United States Patent Application Publication US 2007/0042945 A1 - sequence listing, part 2

SEQ ID NO: 1277 - DNA, 2096 bp, Homo sapien
accaacgcctactccccggtgcagcagggagtcatcatcaaaaggaagagtggggagatcccatgccccttggccgtggaggcgtttgccgctcacctgagctacatctgtagatacgatgacaaatacagcaagtatttcatttctcataaaccaaacaagacctggcagcaggtgttctggttcgccatcagcatcgccatcaacaatgcctacatcctgtacaaaatgtcagacgcctaccacgtggagaggtacagccgggcgcagtttggagagagactcgtcagagagctgctgggcttggaggatgcctctccgacccactgatgctgggggcgcaggactcggtcaagggaggggcaagaggaggaggagagcctgccgttccaacttgcccatcagagacccggacacggcctggtgtgtggcttgctgcctgggagggatgcacagggcctctggagggacaggatggacctggtcagaggacggttgctgtcctcatttgcattccaagaagagcatgtcctccctcgagaaacagtgccgccggtgtgatgagcacttacacccacgttctcaagggcagattctctcatgacatccgtggagcttgcgaggcagcgtggactggtgactgtgaaggaaggcccccgtggtagaatgagctggagcacgctctaagagagatgcctgcttcctaaagatctacagcaatctgggacgtggttcaagttcaagacttgaaggaagcaaagacgccctgcatggttacaatggctcaggtgtcaggggaggccggagggttttccagcatttgcctcatgccagcacctttgaaccggtctcttagaagaagacacacatcctgggtgtacagtggtgaaatggggagtgggtgcccattctgaaaaacgaggcattcctgctcattccctctgcttagctggtgggcaggggagagagggaaatgccaaaaacttggagtgaaggatgatgctattttttatttttaaatatatcttcaggttattttcttactgttgcttcagatctaatgtaaaaggcagatgtcccctcctctccacccccgacgctgaccccggcctcagtcacggctctttgcatgatcacagttctgtgttctggcctgtggcagggccgggaagggccgctggcttccgaacagacgtggttgctctccacgaggcgcatggggagcccgcgggccctaagctttgtcgcagatgtcatcattggcagaattacttgtcttgaaaaataagtagcattgctgaaacacacaaccgaattctctacgatggccatttgctcattgtctttcctctgtgtgtagtgagtgaccctggcagtgtttgcctgctcagagtggcccctcagaacaacagggctggccttggaaaaaccccaaaacaggactgtggtgacaactctggtcaggtgtgatttgacatgagggccggaggcggttgctgacggcaggactggagaggctgcgtgcccggcactggcagcgaggctcgtgtgtcccccaggcagatctgggcactttcccaacccaggtttatgcgtctccagggaagcctcggtgccagagtggtgggcagatctgaccatccccacagaccagaaacaaggaatttctgggattacccagtcccccttcaacccagttgatgtaaccacctcattttttacaaatacagaatctattctactcaggctatgggcctcgtcctcactcagttattgcgagtgttgctgtccgcatgctccgggccccacgtggctcctgtgctctagatcatggtgactcccccgccctgtggttggaatcgatgccacggattgcaggccaaatttcagatcgtgtttccaaacacccttgctgtgccctttaatgggattgaaagcacttttaccacatggagaaatatatttttaatttgtgatgcttttctacaaggtccactattcctgagtttaatgtgtttccaacacttaaggagactctaatgaaagctgatgaattttcttttctgtccaaacaagtaaaataaaaataaaagtct

SEQ ID NO: 1278 - protein, 161 aa, Homo sapien
MTNTASISFLINQTRPGSRCSGSPSASPSTMPTSCTKCQTPTTWRGTAGRSLERDSSESCWAWRMPLRPTDAGGAGLGQGRGKRRRRACRSNLPIRDPDTAWCVACCLGGMHRASGGTGWTWSEDGCCPHLHSKKSMSSLEKQCRRCDEHLHPRSQGQILS

SEQ ID NO: 1279 - DNA, 2830 bp, Homo sapien
gcttcacgctaaagccccagagcccgacgcggcagccgcggtagcggagaagactggagctccgaggagctgcatctgcggcaacctgtgcgctgacgctacgtgcctcctggctccgacgtagctcgcagctccccagtctcactccattccttccccacctggcgcgcacctgctcaagaccagggtcctgccaagcgctaggagggcgcgtgccaggggcgctagggaactgcggagcgcgcgcgccatggggccgccgcctggggccggggtctcctgccgcggtggctgcggcttttccagattgctggcatggtgcttcctgctggccctgagtccgcaggcacccggttcccggggggctgaagcagtgtggaccgcgtacctcaacgtgtcctggcgggttccgcacacgggagtgaaccgtacggtgtgggagctgagcgaggagggcgtgtacggccaggactcgccgctggagcctgtggctggggtcctggtaccgcccgacgggcccggggcgcttaacgcctgtaacccgcacacgaatttcacggtgcccacggtttggggaagcaccgtgcaagtctcttggttggccctcatccaacgcggcgggggctgcaccttcgcagacaagatccatctggcttatgagagaggggcgtctggagccgtcatctttaacttccccgggacccgcaatgaggtcatccccatgtctcacccgggtgcagtagacattgttgcaatcatgatcggcaatctgaaaggcacaaaaattctgcaatctattcaaagaggcatacaagtgacaatggtcatagaagtagggaaaaaacatggcccttgggtgaatcactattcaatttttttcgtttctgtgtccttttttattattacggcggcaactgtgggctattttatcttttattctgctcgaaggctacggaatgcaagagctcaaagcaggaagcagaggcaattaaaggcagatgctaaaaaagctattggaaggcttcaactacgcacactgaaacaaggagacaaggaaattggccctgatggagatagttgtgctgtgtgcattgaattgtataaaccaaatgatttggtacgcatcttaacgtgcaaccatattttccataagacatgtgttgacccatggctgttagaacacaggacttgccccatgtgcaaatgtgacatactcaaagctttgggaattgaggtggatgttgaagatggatcagtgtctttacaagtccctgtatccaatgaaatatctaatagtgcctcctcccatgaagaggataatcgcagcgagaccgcatcatctggatatgcttcagtacagggaacggatgaaccgcctctggaggaacacgtgcagtcaacaaatgaaagtctacagctggtaaaccatgaagcaaattctgtggcagtggatgttattcctcatgttgacaacccaacctttgaagaagacgaaactcctaatcaagagactgctgttcgagaaattaaatcttaaaatctgtgtaaatagaaaacttgaaccattagtaataacagaactgccaatcagggcctagtttctattaataaattggataaatttaataaaataagagtgatactgaaagtgctcagatgactaatattatgctatagttaaatggcttaaaatatttaacctgttaacttttttccacaaactcattataatatttttcataggcaagtttcctctcagtagtgataacaacatttttagacattcaaaactgtcttcaagaagtcacgtttttcatttataacaattttcttataaaaacatgttgcttttaaaatgtggagtagctgtaatcactttattttatgatagtatcttaatgaaaaatactacttctttagcttgggctacatgtgtcagggtttttctccaggtgcttatattgatctggaattgtaatgtaaaaagcaatgcaaacttaggcgagtacttcttgaaatgtctatttaagctgctttaagttaatagaaaagattaaagcaaaatattcatttttactttttcttatttttaaaattaggctgaatgtacttcatgtgatttgtcaaccatagtttatcagagattatggacttaattgattggtatattagtgacatcaacttgacacaagattagacaaaaaattccttacaaaaatactgtgtaactatttctcaaacttgtgggatttttcaaaagctcagtatatgaatcatcatactgtttgaaattgctaatgacagagtaagtaacactaatattggtcattgatcttcgttcatgaattagtctacagaaaaaaaatgttctgtaaaattagtctgttgaaaatgttttccaaacaatgttactttgaaaattgagtttatgtttgacctaaatgggctaaaattacattagataaactaaaattctgtccgtgtaactataaattttgtgaatgcattttcctggtgtttgaaaaagaagggggggagaattccaggtgccttaatataaagtttgaagcttcatccaccaaagttaaatagagctatttaaaaatgcactttatttgtactctgtgtggcttttgttttagaattttgttcaaattatagcagaatttaggcaaaaataaaacagacatgtatttttgtttgctgaatggatgaaaccattgcattcttgtacactgatttgaaatgctgtaaatatgtcccaatttgtattgattctctttaaatataaaatgtaaataaaatattccaataaaaaaaaaaaaaaaaa

SEQ ID NO: 1280 - protein, 428 aa, Homo sapien
MGPPPGAGVSCRGGCGFSRLLAWCFLLALSPQAPGSRGAEAVWTAYLNVSWRVPHTGVNRTVWELSEEGVYGQDSPLEPVAGVLVPPDGPGALNACNPHTNFTVPTVWGSTVQVSWLALIQRGGGCTFADKIHLAYERGASGAVIFNFPGTRNEVIPMSHPGAVDIVAIMIGNLKGTKILQSIQRGIQVTMVIEVGKKHGPWVNHYSIFFVSVSFFIITAATVGYFIFYSARRLRNARAQSRKQRQLKADAKKAIGRLQLRTLKQGDKEIGPDGDSCAVCIELYKPNDLVRILTCNHIFHKTCVDPWLLEHRTCPMCKCDILKALGIEVDVEDGSVSLQVPVSNEISNSASSHEEDNRSETASSGYASVQGTDEPPLEEHVQSTNESLQLVNHEANSVAVDVIPHVDNPTFEEDETPNQETAVREIKS

SEQ ID NO: 1281 - DNA, 1528 bp, Homo sapien
ggcacgaggcaggccaggtgtgtgcgtccgtcggtctttccgtgcccacgccggagaccagccccggaggccgcctgggcctatccctgtgccaggcaccatgaagcaggagtctgcagccccgaacaccccgcccacctcgcagtcccctacgccgtccgctcagttcccccgaaacgacggcgaccctcaagcgctgtggattttcgggtacggctccctggtgtggaggcccgacttcgcctacagcgacagccgtgtgggcttcgtgcgcggctacagccgccgtttctggcagggagacaccttccatcggggcagcgacaagatgcctggccgtgtggtgacgctccttgaagatcatgagggctgcacttggggcgtggcataccaagtgcaaggggagcaggtaagcaaggccctgaagtacctgaatgtgcgagaggcagtgcttggtggctacgataccaaggaggtcaccttctatccccaagatgctcctgaccaaccactgaaggcattggcctatgtggccaccccacagaaccctggttacctgggccctgcgcctgaagaggccattgccacgcagatcctggcctgccggggcttctccggccacaaccttgaatacttgctgcgtctggcagacttcatgcagctctgtgggcctcaggcgcaggacgagcacctggcagccatcgtggacgctgtgggcaccatgttgccctgcttctgccccaccgagcaggctctggcgctggtgtgaggggctgagcccctgcggggagtgctcatgtggacatcagggccagacacccactccagtgcacaagacagacttgcgaccgcttgagcccactgagcagatatggtgggtggctggaggcttctctttctcagtccctgcctgtctgccagcctgcagctctcctgcttgacactgacttactacttgaaactttatttattgcaccatgttggtgtggtgggcaggtggagggcctgccctggacacaggggccctgctgagcagtggccccatcctggaacttgaccagattccccccagtgctgctgctaaccccacaccacccaggcctccacctccccagggagtctccaagagcctcgatcctctgctcactcagcccagccatccatagccctgggaattccacctgccaaggatcccagcaggctggatgagggatagtagggcatgaggagaaggagccctgtaaggactgaggccccggccagcccttctcctccaccagttccccagagcagagctggagctgatgcctggacacagctgctgagcctggcctgggcctcttacccacttggttgttttcttgtccctctgtctgtctgtctatctacttgtctgtctgggccactcctgcctgtgtgttggtctattcctgggaagctcatcactacaggccctggcaaccttcccagtctgtcccatactgttacccataaaactatctctttaaaaaaaaaaaaaaaaaaaaaa

SEQ ID NO: 1282 - protein, 222 aa, Homo sapien
MKQESAAPNTPPTSQSPTPSAQFPRNDGDPQALWIFGYGSLVWRPDFAYSDSRVGFVRGYSRRFWQGDTFHRGSDKMPGRVVTLLEDHEGCTWGVAYQVQGEQVSKALKYLNVREAVLGGYDTKEVTFYPQDAPDQPLKALAYVATPQNPGYLGPAPEEAIATQILACRGFSGHNLEYLLRLADFMQLCGPQAQDEHLAAIVDAVGTMLPCFCPTEQALALV

SEQ ID NO: 1283 - DNA, 2010 bp, Homo sapien
gtcgactaccagaaaatactttcaacataaatgaactctccaacttattaaacttttatatagatagaggaagacagctctttcgggataaccacctgatacctgcagaaacccccagtcctgttattttcagtgattttccatttatctttaattcgctatccaaaattaaattattgcaagctgattcacatataaagatgcagatgtcagaaaagaaagcatacatgcttatgcatgaaacaattctgcaaaaaaaggatgaatttcctccatcacccagatttatacttagagtcagacgaagtcgcctggttaaagatgctctgcgtcaattaagtcaagctgaagctactgacttctgcaaagtattagtggttgaatttattaatgaaatttgtcctgagtctggaggggttagttcagagttcttccactgtatgtttgaagagatgaccaagccagaatatggaatgttcatgtatcctgaaatgtgttcctgcatgtggtttcctgccaagcctaaacctgagaagaaaagatatttcctctttggaatgctgtgtggactctccttattcaatttaaatgttgctaaccttcctttcccactggctctgtataaaaaacttctggaccaaaagccatcattggaagatttaaaagaactcagtcctcggttggggaagagtttgcaagaagttctagatgatgctgctgatgacattggagatgcgctctgcatacgcttttctatacactgggaccaaaatgatgttgacttaattccaaatgggatctccatacctgtggaccaaaccaacaagagagactatgtttctaagtatattgattacattttcaacgtctctgtaaaagcagtttatgaggaatttcagagaggattttatagagtctgtgagaaggagatacttagacatttctaccctgaagaactaatgacagcaatcattggaaatactgattatgactggaaacagtttgaacagaattcaaagtatgagcaaggataccaaaaatcacatcctactatacagttgttttggaaggctttccacaagctaaccttggatgaaaagaaaaaattcctctttttccttacaggacgtgataggctgcatgcaagaggcatacagaaaatggaaatagtatttcgctgtcctgaaactttcagtgaaagagatcacccaacatcaataacttgtcataatattctctccctccctaagtattctacaatggaaagaatggaggaagcactccaagtagccatcaacaacaacagaggatttgtctcacccatgctcacacagtcataatcacctctgagagactcagggtgggctttctcacacttggatccttctgttcttccttacacctaaataatacaagagattaatgaatagtggttagaagtagttgagggagagattgggggaatggggagatgatgatgatggtcaaagggtgcaaaatctcacacaagactgaggcaggagaatagggtacagagatagggatctaaggatgacttggacacactccctggcactgaagagtctgaacactggcctgtgattggtccattccaggaccttcatttgcataaggtatcaaaccacatcagcctctgattggccatgggccagacctgcactctggccaatgattggttcattccaggacattcatttgcataaggagtcaaaccacaccagtcttggattggctgtgagccaattcacctcagtctctaattggctgtgagtcagtctttcatttacatagggtgtaaccatcaagaaacctctacagggtacttaagccccagaagattttgctaccagggctcttgagccacttgctctagcccactcccaccctgtggaatgtactttcacttttgctgcttcactgccttgtgctccaataaatccactccttcaccacccaaaaaaaaaaaaaaaaaaaaaaaaaaaaaaaaaa

SEQ ID NO: 1284 - protein, 379 aa, Homo sapien
MQMSEKKAYMLMHETILQKKDEFPPSPRFILRVRRSRLVKDALRQLSQAEATDFCKVLVVEFINEICPESGGVSSEFFHCMFEEMTKPEYGMFMYPEMCSCMWFPAKPKPEKKRYFLFGMLCGLSLFNLNVANLPFPLALYKKLLDQKPSLEDLKELSPRLGKSLQEVLDDAADDIGDALCIRFSIHWDQNDVDLIPNGISIPVDQTNKRDYVSKYIDYIFNVSVKAVYEEFQRGFYRVCEKEILRHFYPEELMTAIIGNTDYDWKQFEQNSKYEQGYQKSHPTIQLFWKAFHKLTLDEKKKFLFFLTGRDRLHARGIQKMEIVFRCPETFSERDHPTSITCHNILSLPKYSTMERMEEALQVAINNNRGFVSPMLTQS

SEQ ID NO: 1285 - DNA, 2578 bp, Homo sapien
gcccaggcctggctgaggcgccgcggccgggtccctctccacctgccgggcggagcgcacgggccatgggctgagccccgctgagcccgccgggccggccatgggcgatcgcgagcgcaacaagaagcggctgctggagctgctgcgggcgccggacacaggcaacgcgcactgcgccgactgcggggcggcagatcccgactgggcctcttacaagctggggatcttcatctgtctcaactgctgcggcgtccaccgtaacttccctgacatcagcagagttaaatctgtgcgacttgacttctgggacgacagtattgtggagtttatgatccacaatggaaacctccgtgtgaaggccaagttcgaagccagagtcccagctttctactacatcccccaggccaacgactgcctggtcttaaaggaacaatggattcgagctaagtatgagagacgggaatttatggctgatggggaaaccatctcgctcccaggtaaccgagaaggattcctgtggaagcgaggaagggacaactcacagtttctgagaaggaagtttgtacttctggcaagagaaggcctcctgaagtacttcacaaaggaacagggtaaaagccccaaagctgtcatcagcattaaggacttgaatgccaccttccagacagagaagatagggcacccccatgggctgcagatcacctacaggagagatggccacaccaggaacctgtttgtgtatcatgaaagtgggaaggagatagtggactggttcaatgccctccgtgcagcccgtctgcagtacctaaaaatggcctttcctgaactcccagagtctgagctcgtgccattcctcaccaggaactacctcaaacaaggcttcatggaaaagactgggccaaagcagaaagaacctttcaagaaaaggtggttcgccctggattgccatgagcggaggctgctctattacaagaacccactggatgccttcgagcagggccaggtttttcttgggaacaaggagcagggatatgaagcctacgaagacctgcccaagggcatccgaggaaatcgctggaaagccggactcaccattgtcaccccagagcggagatttgtcctcacttgccccagtgagaaggaacagcaggaatggctggaaagtttgcggggtgtcctgtccagccccttgacgcccctcaaccggcttactgcatcaacagagagtggccgcagcagcaggtgacccattaactgaggaactggctgccactgaacacctggaactccttgtgggaagaagtttgcacctcggccctggctgcccaccatcagtgccccgcagtcagcagccattcctggcagtgaactctgccaggactgaagctgtggctttatccatcagctccctgggccttccccgcaacccacctcggggatctgaggatctggtgcatagatgaacatctatcccctcctcccccatacacacctaggcttgaaatgccctacaggcccagaactttctcacatctgaaatggaggcattgcaatgaaaaggcacccacagcatcatgcaagtggcatcttgtaaaaaaaaaaaaaaagtttaatctgaatctaaccatgaggaaataatcagacaaatccacattaggggcattctgctaaacatctgacccagactcttcamaaatgaagagtgaaagataaagtagtcaatggccgggcgcagtgagattgcgccattgcattccagcctgggtgacagagcgagactccgtatcagaaagaaaaagaggaactgaatgaaatctcagatggctgaaatgttagagaaacagagcaccaagtcccctgctctgtgactcgttgttcctttcctctgtcttcaagcaccacgcagaaatacactggatgttctctctttgcttcaatggagacccaaggagctgggaggtctcttaagagactctctgattctccgtggctgggtgtgatggctcatgcccataatcccagccctttgggaagctgaggcaggaggattgagaccaggagttcgagaagagcctgggcaacatagtgagaccccatctctacaaagaaaaaaaaattagctggacatggtaatgaatgcctgtagtcccagctactccggacactgatgtgagaggatcacttgagccagggaggtcatggctacagtgacccctcattgcaccactttacttagcctgggtgacagagtgagaccctatctcaaaaaaaaaaaaaatctatgcattgtatgggactttcctttggatcccccaatcaaaggataagcaatgcgtaagcctgtgtccttcctgaagcttctcgactgcccagatagggaggtgagtcctctctatctcctctggctctggaagcaccttgaaaatgtgcattttcaaggacacttgctgggttgtgcattaagggccagtttacttgtctgcctctttgaccacctgtgaactctgttgggtgtactctgctaagttctggggatgaggaaattaataaaggtacagtcttgccttcaaaaaaaaaa

SEQ ID NO: 1286 - protein, 381 aa, Homo sapien
MGDRERNKKRLLELLRAPDTGNAHCADCGAADPDWASYKLGIFICLNCCGVHRNFPDISRVKSVRLDFWDDSIVEFMIHNGNLRVKAKFEARVPAFYYIPQANDCLVLKEQWIRAKYERREFMADGETISLPGNREGFLWKRGRDNSQFLRRKFVLLAREGLLKYFTKEQGKSPKAVISIKDLNATFQTEKIGHPHGLQITYRRDGHTRNLFVYHESGKEIVDWFNALRAARLQYLKMAFPELPESELVPFLTRNYLKQGFMEKTGPKQKEPFKKRWFALDCHERRLLYYKNPLDAFEQGQVFLGNKEQGYEAYEDLPKGIRGNRWKAGLTIVTPERRFVLTCPSEKEQQEWLESLRGVLSSPLTPLNRLTASTESGRSSR

SEQ ID NO: 1287 - DNA, 1549 bp, Homo sapien
  Unsure 1533-1534: Unknown base
gggcgtctccgcagctcggctcccgcgcgctcagcaccaccagcggcgccagatgcaggcggagcgaggagctcggggaggccgtgggcggcggccaggccgcggccggcctggcggagatcgccacagcgagcggcccggagccgcagcggcggtagccagaggcggcggcggaggcggcggcggggacggaggcggacgccggggccgtggccgtggccggggcttccgcggcgctcgcggaggccgaggaggaggaggcgccccgcgaggcagccgccgggagccgggaggctggggcgcaggggccagcgcgccggttgaagatgacagcgatgcagagacctatggagaagagaatgatgaacagggaaattattctaaaagaaagattgtctctaactgggatcgatatcaagatattgaaaaagaggtcaataatgaaagtggagagtcacagaggggaacagatttcagtgtcctccttagctctgcaggggactcattctcacagttccggtttgctgaggagaaagaatgggatagtgaagcttcttgtccaaaacagaattcagcattttatgtggatagtgagttattggttcgagcccttcaagagctgcctctctgcctccgactcaacgttgctgccgaactggtccagggtacagttcctttagaggttcctcaggtgaaaccaaagagaactgatgatggcaagggattagggatgcagttaaaggggcccttggggcctggaggaagggggcccatctttgagctgaaatctgtggctgctggctgccctgtgttgctgggcaaagacaacccaagcccgggtccttcaagggattctcagaaacccacttccccactgcagtcagcaggagaccatttggaagaagaactagatctgttgcttaatttagatgcacctataaaagagggagataacatcttaccagatcagacgtctcaggacctgaaatccaaggaagatggggaggtggtccaagaggaagaagtttgtgcaaaaccatctgtgactgaagaaaaaaacatggaacctgagcaaccaagtacctccaaaaatgttaccgaggaagagctggaagactggttggacagcatgatttcctaaaaagggggaaaaaagtgcctgaagcaaatcttggttgccttctaacggcaggtgggcataaggctgtccttcaggaccagccagtttacaagcatgtctcaagctagtgtgttccattatgctcacagcagtaaatgcctacctctgtgtttgacatctgaaagaatacattgaagcagcttgttgcatttgtttttctggcttagtaatctaatagatttccttaagggcaggagatagactctggcccttgtttctagcctccttccttgcagtgtttacaacatagccagtgtttacagcatagcagatgctgctgctggttaagagaatagatgcaaacaaggcatgcatttggccaaaataaacaaatgctggtctgtccaaaaaannaaaaaaaaaaaaaaa

SEQ ID NO: 1288 - protein, 362 aa, Homo sapien
  Unsure 1533-1534: Unknown amino acid
MQAERGARGGRGRRPGRGRPGGDRHSERPGAAAAVARGGGGGGGGDGGGRRGRGRGRGFRGARGGRGGGGAPRGSRREPGGWGAGASAPVEDDSDAETYGEENDEQGNYSKRKIVSNWDRYQDIEKEVNNESGESQRGTDFSVLLSSAGDSFSQFRFAEEKEWDSEASCPKQNSAFYVDSELLVRALQELPLCLRLNVAAELVQGTVPLEVPQVKPKRTDDGKGLGMQLKGPLGPGGRGPIFELKSVAAGCPVLLGKDNPSPGPSRDSQKPTSPLQSAGDHLEEELDLLLNLDAPIKEGDNILPDQTSQDLKSKEDGEVVQEEEVCAKPSVTEEKNMEPEQPSTSKNVTEEELEDWLDSMIS

SEQ ID NO: 1289 - DNA, 2559 bp, Homo sapien
tgatagctgcgtaatcatactgcggcaccgtttttttcttgcagcagtagctgcttgcggaggaggtctgcccactgcagctctctgcagtctccggctctctcctgcaggatcggtcaacgcagccgtcgccgccctctgcacccagcccaggtcgccactgcttcagtccggttctcaaagcctcagcaccatcttttatccccgagcagcctggatcgtcgttccctcagtccggacgccactgctaggtccgaccaccgccgcttctgatatttcggtgagtcttttcctgtggaggtttggtctcccgatctctgtggtagccaccttaggcgtgtacggtcctttgaaaaatggccgagtcagagaaccgcaaggagctgtcagaatccagtcaagaagaggctggtaatcagataatggtggaagggctcggggaacatctggagcgcggtgaagatgccgctgctgggcttggagacgatgggaagtgcggtgaagaagctgccgctgggcttggggaagaaggggaaaacggtgaagatactgctgctgggtccggggaagatgggaaaaaaggtggcgatactgatgaggactcagaggcagaccgtccaaaaggacttatcggttatgttttagatacagactttgttgaaagtctacctgtgaaagttaagtaccgtgtgttagcccttaaaaagcttcaaactagagcggccaatttagaatccaaattcctgagggaatttcatgacattgaaagaaagtttgctgaaatgtaccaacccttactggaaaaaagacgtcagatcatcaatgcaatctatgaacctacagaagaggaatgtgaatataaatcagactctgaggactgtgatgatgaggaaatgtgtcatgaagagatgtatggtaatgaggagggtatggtacatgaatatgtggatgaggacgatggttatgaggactattattatgattatgctgtggaagaggaggaggaggaggaggaggaggacgacattgaggctactggagaagagaataaagaagaggaggatcctaagggaattcctgatttttggctaactgttttaaaaaacgttgatacactcactcctttgattaagaaatatgatgagcctattctgaagctcctgacagatattaaagttaagctttcagatcctggcgagcccctcagtttcacactagaatttcacttcaaacccaatgaatatttcaaaaatgagttgttgacaaagacctatgtgctgaagtcaaagctagcatattatgatccccatccctataggggaactgcgattgagtattccacaggctgtgagatagattggaatgaaggaaagaatgtcactttgaaaaccatcaagaagaaacagaaacatcggatctggggaacaatccgaactgtaactgaagattttcccaaggattcatttttcaattttttctctcctcatggaatcacctcaaatggaagggatggaaatgatgattttttacttggtcacaatttacgtacttacataattccaagatcagtattatttttctcaggtgatgcactggaatctcagcaggagggggtagttagagaagttaatgatgcaatttatgacaaaattatttatgataattggatggctgcaattgaggaagttaaagcttgttgcaaaaaccttgaggcattagtagaagacattgatcgttagagcagagtatacatggccctgaaattaactgccctagatatagttactcaaggtataagaagccttgtgttctgtatttttcttgtagtgttagttaaaacatatgtttcaaaaatataagaaaagttcaaaaactaattaatttgaccttgagttttagtagtagaatgttttcaagaaatgtacactgtggtaaatgatttaaaacactagtatagtgttgtgtagcttaatccttctgaagtctttttgtcatgtagctattaatctgtggctatgaaatgatcagaaatgctaagtgagatcaatatttgtttggaaaaaaaatcttgggaaacaacccaagggttttcgctgttgttgtttttctttttctatttttgtttacttagtcctttagctagtggatttaattttgttgtgcctgcttcattttgcaataacaatgcagtagaatttaaaacttggatgcttaagaggcctgcatatagataagaatttcaggcaaaactacatttattgttaataacagcttgttcataggctcttgtattttatgtaactgtgataaataatgaaacttagttatattgaggttattgtttgtcggtgaagtgttagtcacagtattttcaaaagtttgcacatattgttctgtgtaattgtgtaagccataattacagtgtttaattctcttttcctattacatcattcattgaaagtgatcactttaccattttgaaaagatatttcgtgttctttcactgcaaaataaaaagaataaaaatttcaaaaaaaaaaaaaaaaaaaaaaaaaaaaa

SEQ ID NO: 1290 - protein, 460 aa, Homo sapien
MAESENRKELSESSQEEAGNQIMVEGLGEHLERGEDAAAGLGDDGKCGEEAAAGLGEEGENGEDTAAGSGEDGKKGGDTDEDSEADRPKGLIGYVLDTDFVESLPVKVKYRVLALKKLQTRAANLESKFLREFHDIERKFAEMYQPLLEKRRQIINAIYEPTEEECEYKSDSEDCDDEEMCHEEMYGNEEGMVHEYVDEDDGYEDYYYDYAVEEEEEEEEEDDIEATGEENKEEEDPKGIPDFWLTVLKNVDTLTPLIKKYDEPILKLLTDIKVKLSDPGEPLSFTLEFHFKPNEYFKNELLTKTYVLKSKLAYYDPHPYRGTAIEYSTGCEIDWNEGKNVTLKTIKKKQKHRIWGTIRTVTEDFPKDSFFNFFSPHGITSNGRDGNDDFLLGHNLRTYIIPRSVLFFSGDALESQQEGVVREVNDAIYDKIIYDNWMAAIEEVKACCKNLEALVEDIDR

SEQ ID NO: 1291 - DNA, 3874 bp, Homo sapien
gtattctccgccgcccccacgccctcgaggtccccgccaccgaaccagcggcggagcccgcccgcgcctcccgcggcattcccgcaccggatcgctcctcgctggggcgggacctggcctggcggctctggtcactatgagtgaaacatctttcaacctaatatcagaaaaatgtgacattctatccattcttcgggaccatcctgaaaacaggatttaccggaggaaaatcgaggaactcagcaaaaggttcaccgccatccgcaagaccaaaggggatgggaactgcttctacagggccttgggctattcctacctggagtccctgctggggaagagcagggagatcttcaagttcaaagaacgcgtactgcagaccccaaatgaccttctggctgctggctttgaggagcacaagttcagaaacttcttcaatgctttttacagtgtggtggaactggtagagaaggacggctcagtgtccagcctgctgaaggtgttcaacgaccagagtgcctcggaccacatcgtgcagttcctgcgcctgctcacgtcggccttcatcaggaaccgagcagacttcttccggcacttcattgatgaggagatggacatcaaagacttctgcactcacgaagtagagcccatggccacggagtgtgaccacatccagatcacggcgttgtcgcaggccctgagcattgccctgcaagtggagtacgtggacgagatggataccgccctgaaccaccacgtgttccctgaggccgccaccccttccgtttacctgctctataaaacatcccactacaacatcctttatgcagccgataaacattgattaattttaggccatgcagtggaacctgtcacctaatgggactgcattctgaatggaacattccggctcttcaattttttaagcaatttagactgtagcaagaaaatgtgcagccttttgggcaaagcccctgggaacgaggcctacccactatggactatggtaacttggtaggatttttagtatttattttaatggagggacaaatgctttctaactgggcccccgactccgcaccccagttcgcagtgaggccctgggtgggtcacctgccctctctggacttgtttcttcaactggaggaggtccctgcctatgctgacattccattgtagaaaaatggggcctctggtgtctctttaccaggggcagtgcctctctgcgggggaggaaaagctcaaggttagctgtcttaacccaagtgacttaccaggcctacaaaagagtccagtccagtcacttgttggactgggctctgacagatggcctattgaggtcaacttgaatgtgagggctgcggtgtggtttcaaacattcatgatggatgtattttcctacccctaacttaaggagaaaaaaaaaaagacttcctttttttgccaaagtccagaaaggggcctttagcctttagtaggagctcaaattgttggggcccctctacctctctcagggctagaactgcctgactcttggtggacgagcccttcagggttctgctttcagccccacctggacagaggcttacaagactagggtctggaccagaatctgtgtatttctgtctgggaccaggaagctgcagctgtcccatcatccccagcaaatcctagaagtggagtctggatacttcaaggatagaagtgttggcacgcacagccatggacccagctgagcagagcagacgctttgcaggctgcccctggcttcttcctccctttcccgcttctgctctctttatggactggtcagagggtaggtgggaaagaacagacaagccatggaagttggcagtggggagatttccactgtggaaaccgcctgggaattccggccagcagcttcctccttcagccacctggccataccccttaaataagcccctcaccttgctgcctcaggaccttcaagattccatctgtgggctggccggcaagatggcaccagtggggacccacaccctggctgggcagaggtgctgctagcaacccctcttcctctataagaggaaatggaaaatgcagggtgtggaattgccctttggggtccttccttaattgaaggccaccttctcacaggtttcattctgcagggatttactggaatctattggtgctgctgcatgagtctgctgacaacctgactgcacaaggactgggtagcagactcctcagagtcctcttgacacaaatgtcagatttgtgtcactcttctgccttcgtgaaaagccaatagcactctcagatatcaggggattttagttccaagcagggaccctggtttccatactgccctcagctggagtttggatccaaaggctctggctaagtcattatgtcactttctcacaggaatgtaaatttgactgtcacctctgaatttgttcagtgtcccaccatggtctatgagaagtacactggaagcgtggggggaacacatgacatgatttgtgaatatcatcatctttgccagacaagtctccaggggatccctgtttcccaactgaaaggtgtgaacggacacacacacagcctggatgacgccttggctgttctaaggggctgtaaggtgggctctgggccttccagctaggctctcaagcacagcagaagcctcactgggctgctatgtctctgtatttgtggcttgtgtggtagcctcagaagcagagctgtttggcagactggctggagaaattccctctaggagacttgcctgtgctgtgcttccaggtcacagagccccccggaaactcacaggggccctcttcccagaaaagaatctattctatcacttcagaatcaggacactcaagctctggcagaggaaggccaagttactttcatggtcttaccctctgcttttcccctttttgcaaaaaaccactggccaaatccgaaccattgcccttgtttcccccacgttctctctcagatctttgtctcgaagggaaaacatagtggatgaaaaggtgtggcaggctttggcaccttgttaaaatttctagtcatctgtggatgttaccttgcttgtccacagcagccagtcaccctggccagtcccacttcctggataattctctaccctcaccccacagagccatctctctccagaccaaaagctggaaggagagttgctttgagagcttgtttttacaactgcatgtttattatgatactttctctccaaaggaaacttttaaatcaatgggaacaattagcaacagaaagagcacagtccctgcttttgactgggttcctattttaagcacaaatgagagctctggagccagaatgccagggttctaacttcagcattcacttactagctgtatgatcttggccaagtcacttcacctccctgagccccaattcccaagtttgtgaaatggcaacaatacctatgtgtcactggattattggttaaaacagaatgagattccttgtgtgaaaatagctattatacctgacacactcatcgtatgggctctgcaaagggatattccccaacctgtccttcccgacaggaagcatagggcactgcagatggggaagcatgtcaccttggcagtgactcggtggcttcccaagcaggagtgtcaggggaaccatgagagagagtctaggagccaaacacatcaccaccctgagcagatacaggagtggggagggggctgtaactcagtgagtggcttccaggggccccaggccctgctggatgtgggccaagccctacagcttccctaggcagtaagtaaaaacattctcctagcattaaaatggtttccataaaaaaaaaaaaaaaaaaaaaaaaaaa

SEQ ID NO: 1292 - protein, 234 aa, Homo sapien
MSETSFNLISEKCDILSILRDHPENRIYRRKIEELSKRFTAIRKTKGDGNCFYRALGYSYLESLLGKSREIFKFKERVLQTPNDLLAAGFEEHKFRNFFNAFYSVVELVEKDGSVSSLLKVFNDQSASDHIVQFLRLLTSAFIRNRADFFRHFIDEEMDIKDFCTHEVEPMATECDHIQITALSQALSIALQVEYVDEMDTALNHHVFPEAATPSVYLLYKTSHYNILYAADKH

SEQ ID NO: 1293 - DNA, 2372 bp, Mus musculus
gtctgtaggttaagggagaagatggcggcgctaggggaacccgtgcggctggagagagatatttgtagagcaattgaattattggaaaaactacaaaggagtggagaagtaccaccacagaaacttcaggctttgcaaagagtccttcaaagtgaattctgcaatgctgtgagagaggtatatgaacatgtctatgagactgtggacatcagtagcagtcctgaagtgagagcgaacgctactgcaaaggctactgttgctgcatttgctgccagtgaaggacattctcatcctcgagttgttgagctaccaaaaacagaagagggccttggattcaatattatgggaggcaaagaacaaaactctccaatctatatatcccgaataattccaggtggaattgctgatagacatgggggcctcaaacgtggagatcaactcctctctgttaatggagtgagtgttgaaggagaacatcatgaaaaagctgtagaactgctgaaagccgcacaaggaaaggttaaattagtggtacgatacacacccaaagtcttagaagaaatggagtcgcgctttgaaaaaatgagatcagcaaaacgcaggcaacagacctaatacatttcaaaacttgatatttcattttgcgttttagctagagaagttttccttgtgacttactaatggctgcaatgccaatgattgtaagaaaacaaacaaatttatcatgaaattctccttgtcattttataaatgcctattttaacatcatttatggttccagagatgcatacacttttttctgacaagaaaaagtaaaaggtgatgagggcaattctgtcctactgtttttacaggcctttttcaaatgcagattttgtcataaagttgttatagattttttaaaatgcttttttaatattaaaatgtacttttacattcttaatctttttttagaaaggaaaagttttcttcatttagctgctgatttaaaagtaaagttctccaattctttttttttgcttactctattttttttaacctgtgaaatttctttacagttttccaagaaattaagcataacagtctcatctacggcagttcattacactgtcaatgttaacatcattgctgcattttgtactttgaacacacacataatatatataaccagtggtaaatcatgactcagtacagtgcaagttttttcacttttacttaaacataatatataatggatattcatttatactgatttatgaaagtaagtttttaaacactgaaacaatcattgctaaaatacatattcttaatatttgagcattgaggcaagaggatgtaattgatagcattacttattacatccctatttatgttcaaccgtacatcaaattataaatgcaaaacaggttcagatttcatcttttgtgatttcttttaaatactattcatttttatttaaatgcacagtatttcccctatattttagtccttccattcctagagacaaaccagttatttggtggtgggaagtagctgaagcaaagaaggaaaagtaatacctttaacctcactagcttcaagagtagacattcttactagctcaatttaaataattgattttaaataggaagaaaagaggatatatttaagatacatagaaattatgatgcgaagtattcatgagaatctgtagattccatcaaaataagtaggaactcatactaaaattgttggatttaaagaggcaacttttgtttatgattcaaatatgggaatttgagaaatatttcatttgtccactggatgtcactattttactaaaaggcagctattagtgtgggactgtgactgaggtcttaaagactgaaagagttggggttcattttctgttacaacttacaggaacatttgtactttaagaaaaatttaagtgacaaatgttagaagatgatggattgaaaaatataagtaatttggcatattgaccctatataaaaaagtgggcattttgtaacattccttcaggaagaatagaattgtatgcttttttctgcatgtttgtgatcactgtgagtctcagatgattattccagttttcaatgatttttcaaaataaaagtcaatcagcattgttatttatcattaaggtattgaacactggattgcatggttgaatgtgtctttaattcactacaaaatgtgcttgttattgataggatcatgttgttaaattgtaaattttcaaaattaattgatgttttaaaaatgttgagaccaaagtagtatagaagtatggacttaatttaattgtaaaattattagaggtatttgttgtagagctttatatattaaagagaggtattggtgcatat

SEQ ID NO: 1294 - protein, 197 aa, Mus musculus
MAALGEPVRLERDICRAIELLEKLQRSGEVPPQKLQALQRVLQSEFCNAVREVYEHVYETVDISSSPEVRANATAKATVAAFAASEGHSHPRVVELPKTEEGLGFNIMGGKEQNSPIYISRIIPGGIADRHGGLKRGDQLLSVNGVSVEGEHHEKAVELLKAAQGKVKLVVRYTPKVLEEMESRFEKMRSAKRRQQT

SEQ ID NO: 1295 - DNA, 3726 bp, Homo sapien
cagcgctgctccccgggcgctcctccccgggcgctcctccccaggcctcccgggcgcttggatcccggccatctccgcacccttcaagtgggtgtgggtgatttcctggcggggggagcagccaggtgagcccaagatgctgctgcgctcgaagcctgcgctgccgccgccgctgatgctgctgctcctggggccgctgggtcccctctcccctggcgccctgccccgacctgcgcaagcacaggacgtcgtggacctggacttcttcacccaggagccgctgcacctggtgagcccctcgttcctgtccgtcaccattgacgccaacctggccacggacccgcggttcctcatcctcctgggttctccaaagcttcgtaccttggccagaggcttgtctcctgcgtacctgaggtttggtggcaccaagacagacttcctaattttcgatcccaagaaggaatcaacctttgaagagagaagttactggcaatctcaagtcaaccaggatatttgcaaatatggatccatccctcctgatgtggaggagaagttacggttggaatggccctaccaggagcaattgctactccgagaacactaccagaaaaagttcaagaacagcacctactcaagaagctctgtagatgtgctatacacttttgcaaactgctcaggactggacttgatctttggcctaaatgcgttattaagaacagcagatttgcagtggaacagttctaatgctcagttgctcctggactactgctcttccaaggggtataacatttcttgggaactaggcaatgaacctaacagtttccttaagaaggctgatattttcatcaatgggtcgcagttaggagaagattttattcaattgcataaacttctaagaaagtccaccttcaaaaatgcaaaactctatggtcctgatgttggtcagcctcgaagaaagacggctaagatgctgaagagcttcctgaaggctggtggagaagtgattgattcagttacatggcatcactactatttgaatggacggactgctaccagggaagattttctaaaccctgatgtattggacatttttatttcatctgtgcaaaaagttttccaggtggttgagagcaccaggcctggcaagaaggtctggttaggagaaacaagctctgcatatggaggcggagcgcccttgctatccgacacctttgcagctggctttatgtggctggataaattgggcctgtcagcccgaatgggaatagaagtggtgatgaggcaagtattctttggagcaggaaactaccatttagtggatgaaaacttcgatcctttacctgattattggctatctcttctgttcaagaaattggtgggcaccaaggtgttaatggcaagcgtgcaaggttcaaagagaaggaagcttcgagtataccttcattgcacaaacactgacaatccaaggtataaagaaggagatttaactctgtatgccataaacctccataatgtcaccaagtacttgcggttaccctatcctttttctaacaagcaagtggataaataccttctaagacctttgggacctcatggattactttccaaatctgtccaactcaatggtctaactctaaagatggtggatgatcaaaccttgccacctttaatggaaaaacctctccggccaggaagttcactgggcttgccagctttctcatatagtttttttgtgataagaaatgccaaagttgctgcttgcatctgaaaataaaatatactagtcctgacactgaatttttcaagtatactaagagtaaagcaactcaagttataggaaaggaagcagataccttgcaaagcaactagtgggtgcttgagagacactgggacactgtcagtgctagatttagcacagtattttgatctcgctaggtagaacactgctaataataatagctaataataccttgttccaaatactgcttagcattttgcatgttttacttttatctaaagttttgttttgttttattatttatttatttatttattttgtgacggagagagattccatctcaaaaaaacaagttattaaaaatgtatatgaatgctcctaatatggtcaggaagcaaggaagcgaaggatatattatgagttttaagaaggtgcttagctgtatatttatctttcaaaatgtattagaagattttagaattctttccttcatgtgccatctctacaggcacccatcagaaaaagcatactgccgttaccgtgaaactggttgtaaaagagaaactatctatttgcaccttaaaagacagctagattttgctgattttcttctttcggttttctttgtcagcaataatatgtgagaggacagattgttagatatgatagtataaaaaatggttaatgacaattcagaggcgaggagattctgtaaacttaaaattactataaatgaaattgatttgtcaagaggataaattttagaaaacacccaataccttataactgtctgttaatgcttgctttttctctacctttcttccttgtttcagttgggaagcttttggctgcaagtaacagaaactcctaattcaaatggcttaagcaataaggaaatgtatattcccacataactagacgttcaaacaggccaggctccagcacttcagtacgtcaccaggggatctgggttcttcccagctctctgctctgccatctttagcgctggcttcattctcagactctggtagcatgatggctgtagctgtttcatgggccccttcaaacctcatagcaaccagaggaagaaaatgagccattttttgagtctccttcatagacttgaataactctttttcagagcttctcacagcaaacctctcctcatgtctcctcatgtcttattgttcagaaatgggtaatgtggccatttcaccagtcactgccaacaacaacgaggttcctataattgtctctgagtaaccctttggaatggagagggtgttggtcagtctacaaactgaacactgcagttctgcgctttttaccagtgaaaaaatgtaattattttcccctcttaaggattaatattcttcaaatgtatgcctgttatggatatagtatctttaaaattttttattttaatagctttaggggtacacactttttgcttacaggggtgaattgtgtagtggtgaagactcggcttttaatgtacttgtcacctgagtgatgtacattgtacccaataggtaatttttcatccattaccctccttccgccctcttcccttctgagtctccaacatcccttataccactgtgtatgttcttgtgtacctacagctaagcttccacttataagtgagaacatgcagtatttggttttccattcctgagttacttcccttaggataacagcccccagttccgtccaagttgctgcaaaatacattattcttctttatggctgagtaatagtccatggtacatatataccacattttctttatccacttatcagttgatggacacttaggttaattccattcaatttcattcaatttaagtatatttgtaaggagctaaagctgaaaattaaattttagatctttcaatactcttaaattttatatgtaagtggtttttatattttcacatttgaaataaagtaatttttataaccttgaaaaaaaaaaaaaaaaaaaa

SEQ ID NO: 1296 - protein, 543 aa, Homo sapien
MLLRSKPALPPPLMLLLLGPLGPLSPGALPRPAQAQDVVDLDFFTQEPLHLVSPSFLSVTIDANLATDPRFLILLGSPKLRTLARGLSPAYLRFGGTKTDFLIFDPKKESTFEERSYWQSQVNQDICKYGSIPPDVEEKLRLEWPYQEQLLLREHYQKKFKNSTYSRSSVDVLYTFANCSGLDLIFGLNALLRTADLQWNSSNAQLLLDYCSSKGYNISWELGNEPNSFLKKADIFINGSQLGEDFIQLHKLLRKSTFKNAKLYGPDVGQPRRKTAKMLKSFLKAGGEVIDSVTWHHYYLNGRTATREDFLNPDVLDIFISSVQKVFQVVESTRPGKKVWLGETSSAYGGGAPLLSDTFAAGFMWLDKLGLSARMGIEVVMRQVFFGAGNYHLVDENFDPLPDYWLSLLFKKLVGTKVLMASVQGSKRRKLRVYLHCTNTDNPRYKEGDLTLYAINLHNVTKYLRLPYPFSNKQVDKYLLRPLGPHGLLSKSVQLNGLTLKMVDDQTLPPLMEKPLRPGSSLGLPAFSYSFFVIRNAKVAACI

SEQ ID NO: 1297 - DNA, 1412 bp, Homo sapien
ggctgcgcttccctggtcaggcacggcacgtctggccggccgccaggatgcaggccccgcacaaggagcacctgtacaagttgctggtgattggcgacctgggcgtggggaagaccagtatcatcaagcgctacgtgcaccagaacttctcctcgcactaccgggccacaatcggcgtggacttcgcgctcaaggtgctccactgggacccggagactgtggtgcgcctgcagctctgggatatcgcaggtcaagaaagatttggaaacatgacgagggtctattaccgagaagctatgggtgcatttattgtcttcgatgtcaccaggccagccacatttgaagcagtggcaaagtggaaaaatgatttggactccaagttaagtctccctaatggcaaaccggtttcagtggttttgttggccaacaaatgtgaccaggggaaggatgtgctcatgaacaatggcctcaagatggaccagttctgcaaggagcacggtttcgtaggatggtttgaaacatcagcaaaggaaaatataaacattgatgaagcctccagatgcctggtgaaacacatacttgcaaatgagtgtgacctaatggagtctattgagccggacgtcgtgaagccccatctcacatcaaccaaggttgccagctgctctggctgtgccaaatcctagtaggcacctttgctggtgtctggtaggaatgacctcattgttccacaaattgtgcctctatttttaccattttgggtaaacgtcaggatagatataccacatgtggcaagccaaagatctatgcctctgttttttcaatgagagagaaatagcaaatgttctttctatgctttcctcaccatcatcacagtgtttacaaacttttgaaaatatttagtctgttacaaacttctgtcatgtagctgaccaaaatcctgcagggccacagtcggcactgttatttgcttcttttaatcagcaaaggcctcaagtcttaaaataaaaggggagaagaacaaactagctgtcaagtcaaggactggctttcaccttgccctggtgtctttttccagatttcaatatattctctgatggcctgacaggcctattaagtagatgtgatattttcttccaagatgacctccattctcggcagacctaagagttgcctctgagttagctctttggaatcgtgaacacaggtgtgctatattgtccttgtcctaactgtcacttgccatggcctgaatgttggcttaactgaatattgtatgaaaagacatgcctccatatgtgcctttctgttagctctctttgactcaagctgtggggctcctctatacatgctatacatgtaatatatattatatatatttttgcaagtgaacaataaaacattaaaagataaaa

SEQ ID NO: 1298 - protein, 211 aa, Homo sapien
MQAPHKEHLYKLLVIGDLGVGKTSIIKRYVHQNFSSHYRATIGVDFALKVLHWDPETVVRLQLWDIAGQERFGNMTRVYYREAMGAFIVFDVTRPATFEAVAKWKNDLDSKLSLPNGKPVSVVLLANKCDQGKDVLMNNGLKMDQFCKEHGFVGWFETSAKENINIDEASRCLVKHILANECDLMESIEPDVVKPHLTSTKVASCSGCAKS

SEQ ID NO: 1299 - DNA, 2416 bp, Homo sapien
ggcacgaggagcagacgccgggctgcgcgctgggagctgcggtctccggccatggcccccgctccgccccccgccgcctccttctcgccctccgaggtccagcggcgcctggcggccggcgcgtgctgggtccgccgcggggcccgcctctacgacctctccagcttcgtgcggcaccacccggggggcgagcagctgctgcgggccagggcgggccaggacatcagcgccgacctggacgggccgccgcacaggcactcggccaacgcgcgccgctggctggagcagtactacgtgggagagctccgcggggagcagcagggctccatggagaacgagcctgtagcccttgaggaaactcagaagacagatcctgctatggaaccacggttcaaagtggtggattgggacaaggacctggtggactggcgaaagcctctcctgtggcaggtgggccacttgggagagaagtacgatgagtgggttcaccagccggtgaccaggcccatccgcctcttccactcagacctcattgagggcctctctaagactgtctggtacagtgtccccatcatctgggtgcccctggtgctgtatctcagctggtcctactaccgaacctttgcccagggcaacgtccgactcttcacgtcatttacaacagagtacacggtggcagtgcccaagtccatgttccccgggctcttcatgctggggacattcctctggagcctcatcgagtacctcatccaccgcttcctgttccacatgaagccccccagcgacagctattacctcatcatgctgcacttcgtcatgcacggccagcaccacaaggcacccttcgacggctcccgcctggtcttcccccctgtgccagcctccctggtgatcggcgtcttctacttgtgcatgcagctcatcctgcctgaggcagtagggggcactgtgtttgcggggggcctcctgggctacgtcctctatgacatgacccattactacctgcactttggctcgccgcacaagggctcctacctgtacagcctgaaggcccaccacgtcaagcaccactttgcacatcagaagtcaggatttggtatcagcactaaattgtgggattactgtttccacaccctcactccagagaaaccccacctgaagacgcagtgacaactcccaccccctccgtcctgccctcagcccggccctggccccttcccgacccccacccgccattcagaccccattaagaaggttggcttggccaggcaggatgggctgtgtccggccctgcagcctagtggaaggtgctgagggggccctgaggcaggaccgccctcctgacccctggtaggagggtcacatccacttggtggccaggtggcccttggtgacccacttcttcctggagcgtccctgcctagagctcagcccacaggactgcttcaggccgtggccacaggtagcagccgcaaggggaaatgaagaaaactgagccctcgtggccacctgtgtcacccttgtgccttagcctcatgggctgcctaggagctgcctgcacggcacagctcgctttcacagtcagaagtgggtctgtgggatctgtggtccctgtcctccctgctgtcccttctggggaggctttggtggctctgaggtggacaaagagctctcgcaagaagagacagcgtgatgcctcccacagtccaccccagaccctggggcagcccctctggccctgccagctgcctgcgtcgttgggcccagggtggctggcaggagtcccagctgcttgctttaggacctcgcagcttttcttgccgtccctcccctgcctccagaatcacagcccttctccccaagggaggctgaggaggcttctccaccagtggcagccccaccccgtccctggccattcttggcctccaccccgctcaggcccctactcgggcgctcccagaaggagccacctctcagtgcctcacctccccctgcctcccagcctccgcagatgaggttcctgccccttcctcctcgtaaccaaaaccctcactgctcccaggacggtcttatttataaaccagatacatgttcttagtctggtcccagaccaaggagctggtcagacggccctttctaatcctacatgttgagcttatgtaaaaaatgttgtttcctcctgtttttggttcctttcttacccacaaaccattactacttgaaacttaaaaaactcgccaagtgtaaaggctaaagagaagcagtttgacggaccttgtgatttgtactgtttgctgcggagctatttaaagattttggaataaatatacaaaactacggttgtgaaataaaaacttaaattgtatattttgaaaaataaaacactgaaaagaaaccaaaaaaaaaaaaaaaaaaa

SEQ ID NO: 1300 - protein, 280 aa, Homo sapien
MENEPVALEETQKTDPAMEPRFKVVDWDKDLVDWRKPLLWQVGHLGEKYDEWVHQPVTRPIRLFHSDLIEGLSKTVWYSVPIIWVPLVLYLSWSYYRTFAQGNVRLFTSFTTEYTVAVPKSMFPGLFMLGTFLWSLIEYLIHRFLFHMKPPSDSYYLIMLHFVMHGQHHKAPFDGSRLVFPPVPASLVIGVFYLCMQLILPEAVGGTVFAGGLLGYVLYDMTHYYLHFGSPHKGSYLYSLKAHHVKHHFAHQKSGFGISTKLWDYCFHTLTPEKPHLKTQ

SEQ ID NO: 1301 - DNA, 2555 bp, Homo sapien
tattttgtcagatgtgttgaacctcgattaagattgcattatgacattcttgaagaccgagttccatcaggacttattgttgactaccacaatctgttgtctcaatgtgaggagagttacaggaaatttttaaatctgagaagcagtttgtcaaattgtaactctgactccgagcaggaaaatatctccatggtggaagggttaaaattgtattcggagatggaacagttgaaacaaaagctgaaactcattgagaatcctttgttgaggtatgtgtttggttatcagaagaattctaacatccaagcaaagggtgtccgttccagcggtcagaagatcactcatgtggtctcctccaccatgatggctggtctcctgcggtccctgcttacggacaggctttgccaggagcctggtgaggaagaaagagaaattcagttccatagtgatccattgtctgctataaatgcctgcttcgaaggtgacactgttattgtttgtcctggccattatgtggtacatggcactttctccattgctgactccattgagttggaaggatatggcctaccagatgacattgtgatagaaaagaggggcaaaggcgacacttttgtggactgcactggtgctgatattaaaatctcaggcataagatttgttcagcatgatgctgtagagggaatcttaattgctcaccgtggtaagactacgctggaaaactgtgtgctgcagtgtgagacgaccggagtcacagtgcggacatcagcagagtttctaatgaagaactcggatttatatggcgccaagggtgctggtatagaaatctaccctgggagtcagtgcaccctgagtgacaatgggatccatcactgcaaggaagggatcctcattaaggacttcttagatgaacattatgacattcccaagatatccatggtgaataatataatacataataatgaaggttatggtgttgtcttggtgaaacctacaatcttctctgacctgcaagaaaatgctgaagatggaactgaagaaaataaagcgcttaaaattcagacaagtggagagccagatgtggctgaaagagtggatctagaagagctgattgagtgtgcaactggtaaaatggagctttgtgcaagaactgacccttctgagcaagtcgagggaaattgtgaaattgtaaatgaactaattgctgcctccacacagaaaggccagataaagaagaaaaggttgagtgaactggggatcacgcaagctgatgacaacttaatgtcacaggagatgtttgttgggattgtggggaaccagttcaagtggaatgggaaaggtagttttggcacatttcttttctgactacagtgatgtaagtagatagcaaaatactggattttgcacatgctgccctaagaatcactgctgccattgtagtttgctgtattgtctgtattttatatttgattatttgggcttgagtgaaaggtagatttatttccatttgcaggtgttgcacataaaacactccctctttataagaaaaatcataaatgcatataaaatagaaaatatttggagattgcttatctgaaagtcttgctttcttatacacatggttctctcatattaagcctggtggttactttttagtgtaattacctttagcacttcaaagacgaggaagtaaggaagggaatgcaagactagtgcataaaaatgcaataggtgtcatatgtacagcattcttcttagagttgccttttcatcccaattacagtgagtctgatttccatcctgtatttgcataatacttgtcttaaaataaaagcttttatgattgggaatttatctgcctaatcagacttattattgagacgtcaatgggacgcatttttctgttgagctatgcagtcgtcaaaacagcgatagacagcataggaggtttgaagcagaaatgaaatgtgttattcagagccaatgttgtacatagagcattttcactattgctgaatgggaatgattaaaaacaaggtatttttcgggccaggcggtggctcacgcttgtaatcgcagcactttgggaggctgaggcaggaggatcacttgagcccaggagttcaagactagcctaggcaacatagtgagaccctgtctctactaaaaataaatttaaaaaaaattagctgagtgtggtggtgcatgcatgtagttccagctactcaggaggctgaggctagaggatccttgagcccaggaggttgaggctgcagtgaggtgtgattgcgccactgcattccagcttgggcgacagagcgagacccagtctcaaaaaaaaaaaaaaagtatttttctcttaccgttacagtattctgattatattactgacacagtcaaaatgattaactgtacaacctgtatctgctgggtgttcttgttatcatattgtaaaacagctttaaaaatatttatattttaaaaactgtatgtgacattaatatgcctaatgattaaaattatagtgatgaaataaaaaaaaaaaaaaaaaaaaa

SEQ ID NO: 1302 - protein, 391 aa, Homo sapien
MVEGLKLYSEMEQLKQKLKLIENPLLRYVFGYQKNSNIQAKGVRSSGQKITHVVSSTMMAGLLRSLLTDRLCQEPGEEEREIQFHSDPLSAINACFEGDTVIVCPGHYVVHGTFSIADSIELEGYGLPDDIVIEKRGKGDTFVDCTGADIKISGIRFVQHDAVEGILIAHRGKTTLENCVLQCETTGVTVRTSAEFLMKNSDLYGAKGAGIEIYPGSQCTLSDNGIHHCKEGILIKDFLDEHYDIPKISMVNNIIHNNEGYGVVLVKPTIFSDLQENAEDGTEENKALKIQTSGEPDVAERVDLEELIECATGKMELCARTDPSEQVEGNCEIVNELIAASTQKGQIKKKRLSELGITQADDNLMSQEMFVGIVGNQFKWNGKGSFGTFLF

SEQ ID NO: 1303 - DNA, 1952 bp, Homo sapien
agcccggccaggcacccctgcagcatggcctggaacaccaacctccgctggcggctgccgctcacctgcctgctcctgcaggtgattatggtgattctcttcggggtgttcgtgcgctacgacttcgaggccgacgcccactggtggtcagagaggacgcacaagaacttgagcgacatggagaacgaattctactatcgctacccaagcttccaggacgtgcacgtgatggtcttcgtgggcttcggcttcctcatgactttcctgcagcgctacggcttcagcgccgtgggcttcaacttcctgttggcagccttcggcatccagtgggcgctgctcatgcagggctggttccacttcttacaagaccgctacatcgtcgtgggcgtggagaacctcatcaacgctgacttctgcgtggcctctgtctgcgtggcctttggggcagttctgggtaaagtcagccccattcagctgctcatcatgactttcttccaagtgaccctcttcgctgtgaatgagttcattctccttaacctgctaaaggtgaaggatgcaggaggctccatgaccatccacacatttggcgcctactttgggctcacagtgacccggatcctctaccgacgcaacctagagcagagcaaggagagacagaattctgtgtaccagtcggacctctttgccatgattggcaccctcttcctgtggatgtactggcccagcttcaactcagccatatcctaccatggggacagccagcaccgagccgccatcaacacctactgctccttggcagcctgcgtgcttacctcggtggcaatatccagtgccctgcacaagaagggcaagctggacatggtgcacatccagaatgccacgctcgcaggaggggtggccgtgggtaccgctgctgagatgatgctcatgccttacggtgccctcatcatcggcttcgtctgcggcatcatctccaccctgggttttgtatacctgaccccattcctggagtcccggctgcacatccaggacacatgtggcattaacaatctgcatggcattcctggcatcataggcggcatcgtgggtgctgtgacagcggcctccgccagccttgaagtctatggaaaagaagggcttgtccattcctttgactttcaaggtttcaacggggactggaccgcaagaacacagggaaagttccagatttatggtctcttggtgaccctggccatggccctgatgggtggcatcattgtggggctcattttgagattaccattctggggacaaccttcagatgagaactgctttgaggatgcggtctactgggagatgcctgaagggaacagcactgtctacatccctgaggaccccaccttcaagccctcaggaccctcagtaccctcagtacccatggtgtccccactacccatggcttcctcggtacccttggtaccctaggctcccagggcaggtgaggagcaggctccacagactctcctggggcccagaggagctggtgctgacctagctagggatgcaagagtgagcaagcagcacccccacctgctggcttggcctcaaggtgcctccacccctgccctccccttcatcccagggggtctgcctgagaatggagaaggagaagctacaaagtgggcatccaagccgggttctggctgcagaagttctgcctctgcctggggtcttggccacattggagaaaaacaggctcaaagtggggctgggacctggtgggtgaacctgagctctcccaggagacaacttagctgccagtcaccacctatgaggctcttctaccccgtgcctgcacctcggccagcatctcctatgctccctgggtcccccagacctctctgtgttgtgtgcgtggcagcctccaggaataaacattcttgttgtcctttgtaaaaaaaaaaaaaaaaaaa

SEQ ID NO: 1304 - protein, 479 aa, Homo sapien
MAWNTNLRWRLPLTCLLLQVIMVILFGVFVRYDFEADAHWWSERTHKNLSDMENEFYYRYPSFQDVHVMVFVGFGFLMTFLQRYGFSAVGFNFLLAAFGIQWALLMQGWFHFLQDRYIVVGVENLINADFCVASVCVAFGAVLGKVSPIQLLIMTFFQVTLFAVNEFILLNLLKVKDAGGSMTIHTFGAYFGLTVTRILYRRNLEQSKERQNSVYQSDLFAMIGTLFLWMYWPSFNSAISYHGDSQHRAAINTYCSLAACVLTSVAISSALHKKGKLDMVHIQNATLAGGVAVGTAAEMMLMPYGALIIGFVCGIISTLGFVYLTPFLESRLHIQDTCGINNLHGIPGIIGGIVGAVTAASASLEVYGKEGLVHSFDFQGFNGDWTARTQGKFQIYGLLVTLAMALMGGIIVGLILRLPFWGQPSDENCFEDAVYWEMPEGNSTVYIPEDPTFKPSGPSVPSVPMVSPLPMASSVPLVP

SEQ ID NO: 1305 - DNA, 2840 bp, Homo sapien
gtttttgtgcaggaacagcccctcccgtctttgtcctggcggtgagcacccagggctaagcttttgaacactttctttgtgtttggattcagcccaggcaatgcatatttgctttcatttcttcttgagcttgaggagctcctgggtgcaaatcttggaaaatgaggatctctgagcctttccaggccagctctttgttttgtagcagacaattgaggctttgaaaaggaaagtgggtgggggcaccccacaggtggccctcatcacccaattgccagtgcctgcaggctgcttcagcagaggcccagagtcaaagaggacttaaaaccagctgtcgtttctcccttagcttctgtgtatgagagaaacgacttctgtttttcaaagtaagaacaaggaggaatttgtttctaaaagaacattaaaacacaggctcgtggtctaaaagcaaatggttcagcaggatgttcagggccttaaagcacagtcagcaggactcagcatctcccagcacctgctctccggttgtcatggtaacatcatccccaacccaaccaccttgtccagccgagagacagcaatcataaggagggacctcggtttcccccgaggatcctgggcttcctttctgaaacgcttgcttctgagctcagcaaccaggaacaccaggccagcccatccccagcacctctgtggagatgagggacaaagtcctacagtccctcttcctgttctgatgagaaagggagggaagaaaacataccccgagcgcctgcaatatggtcatgacactttcaaaaagcctgtgctatggagtcatgatcagaaaccagagtgtggagagggtcagcagcctgcctcagagcagccagctaggcggggagtggtaaatttgggacttgtacccaggcatgactggctccgagcccagtgctccactctatggaatgttccctgggcctcagttgctttcctttcctttgcaggccgcgggctgctgccactctggcagctggtgagttagctggagggcaacattccaaagcaggggcagcatgctgctttcctcctgtgcccactcctgcggggaagtccgttgactcccaccgctgaagggagctggcaacaccaggatgaggtcccaggggacgggagcaggtacccactgtctgtctaccttcccactggaaaagcacggacaggccagcccttgcgggggcaggcagaggacagagttggctttgcgcggtctctgcctgctgagcagttccaattcctctcatgggagaaacaaggaggcagtcgcttgtgcatgttccagaagttttactggggaggaggaagcggacagaggaagctgtgtgtgcatgtgaaggggtgggcagggtgggagggatgcacgcgtatgtgagcatagcatgtgtgagtactacacacatctccatgcagaagcacaactgggcagccctggcttccagctctgggcttcagcacaacagacaccagcctgtggtctctcagaagccagggagaccacatcgggctcaggacgttttacccaaagtccagagtttttatgcctctccctggcattctccataaagaagggaaggtcagatgaccccttagatctgtgtcatctgggaatttccttgggctggtttagacacgatgccctctttttctcaggatagcagataacctgctttgaaagagggcttaattctgtgggtcctaaattttctcctttctctctctctttctgtgtgtgtgtgttgggaaaatggcaagtttccaataccagctttggaggaacgattacgttttccctccaatttcaagtccgaaagaccagagccctcattccaaagccccccacccagatggattttttcgtttcatttgtcatccgtcccatgggagggccccatgtctcctcagaacccatcctggaggcagcaggtcgggtagagtgagtttggcctgctcatgacctccacccctgagattgtgaacaaggatgtctggggcgatgctgagaatgtttttgaagctgctcccagatgacgctgatgatcacaccagattgagtgctgcgatcgccttgagtccagcctctgcataaacgaggttctcataaacaagttcactctaccctaagctaagtctatgtgagcaaacccacttcatcctttgtacctggagacctggttacactaacctgatactgacctgttcatgtagctggaatggtgtgtttcatgcagtgtggaccaagcaatggcatggggtgtgtgtgtgtgtgtgtgtgtgtctgtgtgtgtgtgtttgtgtatgcgttcacacttgtgtgtgtatatgtgcatgtagatgctgcataaatgatttttgatgtcaaagacaaacacattccattgttttaaatattctattatgtaaacaatacgcagagggaccatatctactcttgtcatattatttgtgatggtaaaacatgcatttgcaataaattaagctttctgggaaggcaagcagtattggagccaaacgactgtctcggaacatgtgtgtgttatctcggttcatatcaagtccaaagctaatggagccttccccgccatccagggaggaacaccaggaccccggagtttcttcttagtgctatattttaaagttgcattgacgttttcctccccttccttttgtgcaagttggaagtagcagtgttctaaaagatggtttgacgtttttgctgttgttttatgtttttaaaaatgtatctgctttgtgtttggaaataaaaatctctattttggtctatgaaaaaaaaaaaaaaaaaa

SEQ ID NO: 1306 - protein, 190 aa, Homo sapien
MVQQDVQGLKAQSAGLSISQHLLSGCHGNIIPNPTTLSSRETAIIRRDLGFPRGSWASFLKRLLLSSATRNTRPAHPQHLCGDEGQSPTVPLPVLMRKGGKKTYPERLQYGHDTFKKPVLWSHDQKPECGEGQQPASEQPARRGVVNLGLVPRHDWLRAQCSTLWNVPWASVAFLSFAGRGLLPLWQLVS

SEQ ID NO: 1307 - DNA, 927 bp, Homo sapien
ggaagtttaggttaactgtcttaaatttccaaagctgtaatcattattttcattctcaaagtgatggccttgtgttttgctcctctcctccagggccagactgagcccaggttgatttcaggcggacaccaatagactccacagcagctccaggagcccagacaccggcggccagaagcaaggctaggagctgctgcagccatgtcggccctcagcctcctcattctgggcctgctcacggcagtgccacctgccagctgtcagcaaggcctggggaaccttcagccctggatgcagggccttatcgcggtggccgtgttcctggtcctcgttgcaatcgcctttgcagtcaaccacttctggtgccaggaggagccggagcctgcacacatgatcctgaccgtcggaaacaaggcagatggagtcctggtgggaacagatggaaggtactcttcgatggcggccagtttcaggtccagtgagcatgagaatgcctatgagaatgtgcccgaggaggaaggcaaggtccgcagcaccccgatgtaaccttctctgtggctccaaccccaagactcccaggcacatgggatggatgtccagtgctaccacccaagccccctccttctttgtgtggaatctgcaatagtgggctgactccctccagccccatgccggccctacccgcccttgaagtatagccagccaaggttggagctcagaccgtgtctaggttggggctcggctgtggccctggggtctcctgctcagctcagaagagccttctggagaggacagtcagctgagcacctcccatcctgctcacacgtccttccccataactatggaaatggccctaatttctgtgaaataaagactttttgtatttctggggctgaggctcagcaacagcccctcaggcttccaaaa

SEQ ID NO: 1308 - protein, 114 aa, Homo sapien
MSALSLLILGLLTAVPPASCQQGLGNLQPWMQGLIAVAVFLVLVAIAFAVNHFWCQEEPEPAHMILTVGNKADGVLVGTDGRYSSMAASFRSSEHENAYENVPEEEGKVRSTPM

SEQ ID NO: 1309 - DNA, 1534 bp, Homo sapien
tttgcgctcggggaattaaaagaggggaaaaaaagcccgaagaaaactcacgccccaaacaaaacgcaaggagaggagggcgcgcggcctgcagccctcgcccgcgtccccggccgcggcgtgatgcgcgcggaccagcccgcgacgcccgggctgccgctgtccccgcacctggacgctggcgcggtggccgcgccccagcctcgatcgctcgccgcggcgactcggccccaggcttccggcgccggtgggggccctcgctctccatggggctgagggactggctgagaaccgtgtgctgctgctgccggtgcgagtgcttggaggagcgcgccctgcctgagaaggagcccctcgtcagtgataacaatccatattcctcatttggagcaactctggtgagggatgatgagaagaatttatggagtatgccccatgatgtgtcccacacagaggcagacgacgacagaaccctgtacaatttgatagtcattcgtaatcagcaggccaaagactcagaggagtggcagaagctcaactatgatatccataccctgcggcaggttcgaagggaagtaagaaacagatggaagtgcatcttagaagatttaggttttcaaaaggaagctgactctttgttgtcagtgactaaactcagcaccatcagtgattctaaaaacacaaggaaagctcgagagatgttgttaaaactggctgaagaaaccagtattttcccaacaagttgggagctctcagagagatatctctttgttgtggaccgtctcattgcacttgatgctgcagaagagttctttaagcttgctcgtcgaacttaccccaagaagcctggggttccatgcctggcagatggccagaaagaactgcacctgtggggggacctctcatgcagacttgcacatatgcagggagtattgcactgaagatctttgctggaccttcttctcttcagaagataattttcaaaagggagcaatgctgtgaatgcagcttgcttctctctacagattgagaagtccagcttcaaaagttacttgccacttaagcaaggaacttgtcaagagatcatggttcatgttactgaaaagactttaaggatttgtaaggttaatccatagattgctgagaacaatggaaatatttttatttttacagattttgcacttctgaattcaggttaaaaactaacttgtatttagtctgcttagaggactgtgacttgaaaatttttatataccaatgagctttttggtagcgtccacaatgtttaaaatatttcataggcgagatccgtgttctccatttattaatgcattgtagaccaatttaactgctgtgtttcaggaaaattcttcctagtttaataagcaagctaaaagttttattttttatatttagtgcttaatctttgcctcatgttatgtaaaattagcctgcagatattttctctcaattctgtagactctcgcaagataaacattcaaacagtgaaacaaacaataaaataaataaacct

SEQ ID NO: 1310 - protein, 224 aa, Homo sapien
MGLRDWLRTVCCCCRCECLEERALPEKEPLVSDNNPYSSFGATLVRDDEKNLWSMPHDVSHTEADDDRTLYNLIVIRNQQAKDSEEWQKLNYDIHTLRQVRREVRNRWKCILEDLGFQKEADSLLSVTKLSTISDSKNTRKAREMLLKLAEETSIFPTSWELSERYLFVVDRLIALDAAEEFFKLARRTYPKKPGVPCLADGQKELHLWGDLSCRLAHMQGVLH

SEQ ID NO: 1311 - DNA, 2404 bp, Homo sapien
tattgctggctcgtttgtgccaccttgcacttcctgcatgcccccacgcctgctgggcagacccttacaagcatctataccagcttcctgcgcctcaacttcagcggggaaaccctggacagcactgacccctccaatttgtccctgatggcctatgcagcccgaaccatgggcaagttggcctatgagggggtgtcctcccgcaagacctacttctctgaagaggatgtctgtggctgcctggaggctggcatcaggacggaggaggagtttcagctgctgcacatcttccgtcgggatgccctgaggtttttcctggccccatgtgtggagccagggcgtgcaggcaccttcgtgttcaccgtgcccgccatgcaggaatacctggctgccctctacattgtgctgggtttgcgcaagacgaccctgcaaaaggtgggcaaggaagtggctgagctcgtgggccgtgttggggaggacgtcagcctggtactgggcatcatggccaagctgctgcctctgcgggctctgcctctgctcttcaacctgatcaaggtggttccacgagtgtttgggcgcatggtgggtaaaagccgggaggcggtggctcaggccatggtgctggagatgtttcgagaggaggactactacaacgatgatgttctggaccagatgggcgccagtatcctgggcgtggagggcccccggcgccacccagatgagccccctgaggatgaagtcttcgagctcttccccatgttcatgggggggcttctctctgcccacaaccgagctgtgctagctcagcttggctgccccatcaagaacctggatgccctggagaatgcccaggccatcaagaagaagctgggcaagctgggccggcaggtgctgcccccatcagagctccttgaccacctcttcttccactatgagttccagaaccagcgcttctccgctgaggtgctcagctccctgcgtcagctcaacctggcaggtgtgcgcatgacaccagtcaagtgcacagtggtggcagctgtgctgggcagcggaaggcatgccctggatgaggtgaacttggcctcctgccagctagatcctgctgggctgcgcacactcctgcctgtcttcctgcgtgcccggaagctgggcttgcaactcaacagcctgggccctgaggcctgcaaggacctccgagacctgttgctgcatgaccagtgccaaattaccacactgcggctgtccaacaacccgctgacggaggcaggtgttgccgtgctaatggaggggctggcaggaaacacctcagtgacgcacctgtccctgctgcacacgggccttggggacgaaggcctggagctgctggctgcccagctggaccgcaaccggcagctgcaggagctgaacgtggcgtacaacggtgctggtgacacagcggccctggccctggccagagctgcccgggagcacccttccctggaactgctacacctctacttcaatgagctgagctcagagggccgccaggtcttgcgagacttggggggtgctgctgaaggtggtgcccgggtggtggtgtcactgacagaggggacggcggtgtcagaatactggtcagtgatcctcagtgaagtccagcggaacctcaatagctgggatcgggcccgggttcagcgacaccttgagctcctactgcgggatctggaagatagccggggtgccacccttaatccttggcgcaaggcccagctgctgcgagtggagggcgaggtcagggccctcctggagcagctgggaagctctggaagctgagacactggcggcaggcacctagctatgtgaccactggccctaaaccttttccctctgtggcctcctggcttgcactgctccctctagaaagattccttcaggtctggaggcagaggaatgggcatagctgagccagttgccctcctagggcatgtttgaccaggactgagtctggaatctccaagttaaagatggtgaatcaatgcttcgggcttggagatggaacatgcctcctctccattcagctagaaggaccaaagcatgtggcatttggatggccagagtgccctgaagcaccactaccaaccttgcctccccctcctctcaaagagcctctgattgtgtcaccaaggggctcacatcttatgtctgccatgccaggggtgtcgccatccagatgtgttggaagcttcccctcctgccttatgctcacctgtggacaccgaggatgccctcacattggtgctctctcctcatcctcatgccccctttgccacaatggtatgatggcttggtagcccctcgaggcagatgcacctgacttgctgctattaaaaagccgtgtgccttctaccaaaaaaaaaaaaaaaaa

SEQ ID NO: 1312 - protein, 554 aa, Homo sapien [sequence omitted]

SEQ ID NO: 1313 - DNA, 1014 bp, Homo sapien
ttcctcagaaacgagcaaacctgaaagctactctctcagcttcagagggaaaaaatggttgtagatttctggacttgggagcagacatttcaagaactaatccaagaggcaaaaccccgggccacatggacgctgaagttggatggcaaccttcagctagactgcctggctcaagggtggaagcaataccaacagagagcatttggctggttccggtgttcctcctgccagcgaagttgggcttccgccaagttgcagattctgtgccacacgtactgggagcactggacatcccagggtcaggtgcgtatgaggctctttggccaaaggtgccagaagtgctcctggtcccaatatgagatgcctgagttctcctcggatagcaccatgaggattctgagcaacctggtgcagcatatactgaagaaatactatggaaatggcatgaggaagtctccagaaatgccagtaatcctggaagtgtccctggaaggatcccatgacacagccaattgtgaggcatgcactttgggcatatgtggacagggcttaaaaagctacatgacaaagccgtccaaatccctactcccccacctaaagactgggaattcctcacctggaattggtgctgtgtacctcgcaaaccaagccaagaaccagtcagatgaggcaaaagaggctaaggggagtgggtatgagaaattagggcccagtcgagacccagatccactgaacatctgtgtctttattttgctgcttgtatttattgtagtcaaatgctttacatcagaatgatgaaaataggcttgccactttctcttattttaattccatggtagtcaatgaactggctgccactttaatataactgaaaattcattttgagaccaagcaggatcaagtttgtagaataaacactggtttcctagctatcctctgaaaacagtatgaaacatgaccaagtacataatggatttagtaataaatattgtcgaattgctaaaaaaaaaaaaa

SEQ ID NO: 1314 - protein, 246 aa, Homo sapien
MVVDFWTWEQTFQELIQEAKPRATWTLKLDGNLQLDCLAQGWKQYQQRAFGWFRCSSCQRSWASAKLQILCHTYWEHWTSQGQVRMRLFGQRCQKCSWSQYEMPEFSSDSTMRILSNLVQHILKKYYGNGMRKSPEMPVILEVSLEGSHDTANCEACTLGICGQGLKSYMTKPSKSLLPHLKTGNSSPGIGAVYLANQAKNQSDEAKEAKGSGYEKLGPSRDPDPLNICVFILLLVFIVVKCFTSE

SEQ ID NO: 1315 - DNA, 4700 bp, Homo sapien
atggccccctcggcctgggccatttgctggctgctagggggcctcctgctccatgggggtagctctggccccagccccggccccagtgtgccccgcctgcggctctcctaccgagacctcctgtctgccaaccgctctgccatctttctgggcccccagggctccctgaacctccaggccatgtacctagatgagtaccgagaccgcctctttctgggtggcctggacgccctctactctctgcggctggaccaggcatggccagatccccgggaggtcctgtggccaccgcagccaggacagagggaggagtgtgttcgaaagggaagagatcctttgacagagtgcgccaacttcgtgcgggtgctacagcctcacaaccggacccacctgctagcctgtggcactggggccttccagcccacctgtgccctcatcacagttggccaccgtggggagcatgtgctccacctggagcctggcagtgtggaaagtggccgggggcggtgccctcacgagcccagccgtccctttgccagcaccttcatagacggggagctgtacacgggtctcactgctgacttcctggggcgagaggccatgatcttccgaagtggaggtcctcggccagctctgcgttccgactctgaccagagtctcttgcacgacccccggtttgtgatggccgcccggatccctgagaactctgaccaggacaatgacaaggtgtacttcttcttctcggagacggtcccctcgcccgatggtggctcgaaccatgtcactgtcagccgcgtgggccgcgtctgcgtgaatgatgctgggggccagcgggtgctggtgaacaaatggagcactttcctcaaggccaggctggtctgctcggtgcccggccctggtggtgccgagacccactttgaccagctagaggatgtgttcctgctgtggcccaaggccgggaagagcctcgaggtgtacgcgctgttcagcaccgtcagtgccgtgttccagggcttcgccgtctgtgtgtaccacatggcagacatctgggaggttttcaacgggccctttgcccaccgagatgggcctcagcaccagtgggggccctatgggggcaaggtgcccttccctcgccctggcgtgtgccccagcaagatgaccgcacagccaggacggccttttggcagcaccaaggactacccagatgaggtgctgcagtttgcccgagcccaccccctcatgttctggcctgtgcggcctcgacatggccgccctgtccttgtcaagacccacctggcccagcagctacaccagatcgtggtggaccgcgtggaggcagaggatgggacctacgatgtcattttcctggggactgactcagggtctgtgctcaaagtcatcgctctccaggcagggggctcagctgaacctgaggaagtggttctggaggagctccaggtgtttaaggtgccaacacctatcaccgaaatggagatctctgtcaaaaggcaaatgctatacgtgggctctcggctgggtgtggcccagctgcggctgcaccaatgtgagacttacggcactgcctgtgcagagtgctgcctggcccgggacccatactgtgcctgggatggtgcctcctgtacccactaccgccccagccttggcaagcgccggttccgccggcaggacatccggcacggcaaccctgccctgcagtgcctgggccagagccaggaagaagaggcagtgggacttgtggcagccaccatggtctacggcacggagcacaatagcaccttcctggagtgcctgcccaagtctccccaggctgctgtgcgctggctcttgcagaggccaggggatgaggggcctgaccaggtgaagacggacgagcgagtcttgcacacggagcgggggctgctgttccgcaggcttagccgtttcgatgcgggcacctacacctgcaccactctggagcatggcttctcccagactgtggtccgcctggctctggtggtgattgtggcctcacagctggacaacctgttccctccggagccaaagccagaggagcccccagcccggggaggcctggcttccaccccacccaaggcctggtacaaggacatcctgcagctcattggcttcgccaacctgccccgggtggatgagtactgtgagcgcgtgtggtgcaggggcaccacggaatgctcaggctgcttccggagccggagccggggcaagcaggccaggggcaagagctgggcagggctggagctaggcaagaagatgaagagccgggtgcatgccgagcacaatcggacgccccgggaggtggaggccacgtagaagggggcagaggaggggtggtcaggatgggctggggggcccactagcagcccccagcatctcccacccacccagctagggcagaggggtcaggatgtctgtttgcctcttagagacaggtgtctctgcccccacaccgctactggggtctaatggaggggctgggttcttgaagcctgttccctgcccttctctgtgctcttagacccagctggagccagcaccctctggctgctggcagccccaagggatctgccatttgttctcagagatggcctggcttccgcaacacatttccgggtgtgcccagaggcaagagggttgggtggttctttcccagcctacagaacaatggccattctgagtgaccctcagagtgggtgtgtgggtgcgtctagggggtatcccggtagggggcctgcagggagccagagggtggaaatggcctctaagctagcaccccgtaagaagagcctacctgaccgacttggggagggaacacagaggtgttgggaaggtggagcaacaatgcacctcccctcctgtcgcgccgtgatatcttggtggctccctgccactgcccaccgcctcttctccatctgagaatcacggagaggtgtagataatctagaggcatagactgctagagcccccagggatctggggtggtcagggctcaggcttcactttgtaaaccaggtgggggcatctcacagcctgacttcccttccccaggccagggttgctgggatgcctgcccctcctgagaggaccccctccccattgtcaggctctccatgtccacgagcggggaggggtgggttctggggcattgttgtcccttgtgtctgtggactagagatagggtgggggagctggggaagggtgcaggcgggaagagtgggctgtctttcccagggtgatgcaagcatgccgcagccctggaggctgggaatgtggaggctctgtgagccctgcagccctcagaatcagggccagggatgcagaagattgagaggatatggagatggatagagggcaggagacccttaggatagattgtgggacccaggcaggaacaggtgtccacaagaactcaggatggcatcagttagctcagaagccacctggaagacccagtgtttccatctctggaatctctgttttatgctaaatggatttaggaagactgtttttcttttaagggggaaacaaggtagagaaaaggacgaagaagtgtaagtcccgctgattctcgggggtaaggctcggatggcaaggacgcgttctgcctgggcatgtaggggaggtgtttttgccatcaccagtttctcaggctggggagcacagaggggaggaggaggactaaatgaaaagttgttcccagcctgcacatgaacacattcatgacacacaaaactggctggaaggagataagagcactgggtttgagattccctccattaaaacaaccaagacaaagaaaggaggggaaaaaaagataaaaagcaagccagggttccctgccctattgaaactcaaacccagactgccttgggttttatctttcccttacccctggcacctccagagaactgggacctgaaatagtccctccgttctcccctttgaccatgtaataaatgaaccagaagcactgagattaacctatcaacgccctgagaagccttccagcctgcggtgctgtctgctgggaggtcagctggtcaaggcagaggaggagaggaggaaaggatgggggctgaagagcagaagggaggggagacagaggggattaaagaggggaggagagagtgcagagctccaggaaagggtatcagagctgcagccagctctgccctctaccctagggaggccagaaagacacaaacagccctccgggcctttacgctggactctggcttggcaggctccaggcagggtcctctgggaagttactctagaaaacgaagggaggaggagcacaagatcctcagcaacgaacacctgcacttagaaaaagtggacagcttctgccaaccacaccctacccatggtactgtatgctattaactcctggaaacgccccgtaaatgcgagttgtttttgtatttgtgtgttgagatgggccttgtggtttctctgtactcagagcacatttcttgtaattactattgttatttttattgtcatgactgcccctgagctctggtgagaaaagctgaatttacaaggaaagggatgaagttaatatttgcatcacataattatatcattactgtgtatctgtgtattgtactaaatggactgatgctgcgcacatgagctgaaaatgaagagccctcccatcc

SEQ ID NO: 1316 - protein, 782 aa, Homo sapien
MAPSAWAICWLLGGLLLHGGSSGPSPGPSVPRLRLSYRDLLSANRSAIFLGPQGSLNLQAMYLDEYRDRLFLGGLDALYSLRLDQAWPDPREVLWPPQPGQREECVRKGRDPLTECANFVRVLQPHNRTHLLACGTGAFQPTCALITVGHRGEHVLHLEPGSVESGRGRCPHEPSRPFASTFIDGELYTGLTADFLGREAMIFRSGGPRPALRSDSDQSLLHDPRFVMAARIPENSDQDNDKVYFFFSETVPSPDGGSNHVTVSRVGRVCVNDAGGQRVLVNKWSTFLKARLVCSVPGPGGAETHFDQLEDVFLLWPKAGKSLEVYALFSTVSAVFQGFAVCVYHMADIWEVFNGPFAHRDGPQHQWGPYGGKVPFPRPGVCPSKMTAQPGRPFGSTKDYPDEVLQFARAHPLMFWPVRPRHGRPVLVKTHLAQQLHQIVVDRVEAEDGTYDVIFLGTDSGSVLKVIALQAGGSAEPEEVVLEELQVFKVPTPITEMEISVKRQMLYVGSRLGVAQLRLHQCETYGTACAECCLARDPYCAWDGASCTHYRPSLGKRRFRRQDIRHGNPALQCLGQSQEEEAVGLVAATMVYGTEHNSTFLECLPKSPQAAVRWLLQRPGDEGPDQVKTDERVLHTERGLLFRRLSRFDAGTYTCTTLEHGFSQTVVRLALVVIVASQLDNLFPPEPKPEEPPARGGLASTPPKAWYKDILQLIGFANLPRVDEYCERVWCRGTTECSGCFRSRSRGKQARGKSWAGLELGKKMKSRVHAEHNRTPREVEAT

SEQ ID NO: 1317 - DNA, 3401 bp, Homo sapien
aaaatttgaagacaagatgggcacctactctacaattctgataaaaacagaggtcatcgaatgtgggaactactgtggagtacgcatcattcactctttgattgcagagttctcactggaagaattgaagaaaagctatcacctgaataaaagtcaaattatgttggatatgctaactgagaatttgttcttcgatactggtatgggaaaaagtaaatttttgcaagatatgcacacactcctactcacaagacaccgcgatgaacatgaaggtgaaacaggaaattggttttccccatttattgaagcattacataaagatgaaggaaatgaagcagttgaagctgtattgcttgaaagtatccatcggttcaacccaaatgcattcatttgccaagcgttggcaagacatttctacattaaaaagaaggactttggcaatgctctaaactgggcaaaacaagcaaaaatcatagaacctgacaattcttatatctcagatacactgggtcaagtctacaaaagtaaaataagatggtggatagaggaaaacggaggaaacgggaacatttcagttgatgatctaattgctcttttggatttagcagaacatgcctcaagtgcattcaaagaatctcaacagcaaagtgaagatagagagtatgaagtgaaggaaagattgtatccgaagtcaaaaaggcggtatgatacttacaatatagctggttatcaaggagagatagaagttgggctttacacaatccaaattctccagctcattcctttttttgataataaaaatgagctatctaaaagatatatggtcaattttgtatcaggaagtagtgatattccaggggatccaaacaatgaatataaattagccctcaaaaactatattccttatttaactaaattgaaattttctttgaaaaagtcctttgatttttttgatgaatactttgtcctgctaaaacccaggaacaatattaagcaaaatgaagaggccaaaactcggagaaaggtggctggatattttaagaaatatgtagatatattttgtctcttagaagaatcacaaaacaacacaggtcttggatcaaagttcagtgagccacttcaagtagagagatgcaggagaaacctagtagctttaaaagcagacaagttttctgggctcttggaatatcttatcaaaagtcaagaggatgctataagcactatgaaatgtatagtgaacgaatatacttttctcttagaacaatgcactgtcaaaatccagtcaaaagaaaagctaaatttcatcttggccaacattattctctcctgtatccaacctacctccagattagtaaagccagttgaaaaactaaaagatcagcttcgagaagtcttgcaaccaataggactgacttatcagttttcagaaccgtattttctagcttccctcttattctggccagaaaatcaacaactagatcaacattctgaacaaatgaaagagtatgctcaagcactaaaaaattctttcaaggggcaatataaacatatgcatcgtacaaagcaaccaattgcatatttctttcttggaaaaggtaaaagactggaaagacttgttcacaaaggaaaaattgaccagtgctttaagaagacaccagatattaattccttgtggcagagtggagatgtgtggaaggaggaaaaagtccaagaacttttgcttcgtttacaaggtcgagctgaaaacaattgtttatatatagaatatggaatcaatgaaaaaatcacaatacccatcactcccgcttttttaggtcaacttagaagtggcagaagcatagagaaggtgtctttttacctgggatttcccattggaggcccacttgcttatgacattgaaattgtttaagagcctgatattcttcctccaagaatttgatctcagtacccatttaatttttttggactcaagatctatgctttaaaccggcaaggttatagatacagcctctagctcttcagatctgtacatgcagtatttaatttcctcttaaacatgttatgagttctacaaggacaatagtgaaaaaggaaggagtgagatatatgaaaagtagcaaatatgttccttggtttggttaacatcattgatgacaaaataataaggagctatgactggagtcaggagaagttagtgtaataagctggctacacagaaccccactacttaccaggcatggattgaagaagattgtctactcaaatggcatttagacattagaatgtctgggaaaatatttctcaaagacagcaaaaacctctcaaactgaggagcaacatttattcttactaagcagatcatcaatgtatcatgtgcttggcactcaaggatcttccaaaacagaggaccaaccagtcttctgaaggtcatgcccacagaagtcatcggaccttaccaaagtaggttggagaattagattgccttttcatgcagtgagattcagttaagcaaaaatgaaatttgtctctatagctaattagcttatcaactcccctccaaacaaacaattaaaaaaaaaacatacagacactcaaattccacaagctaatgaacaaaagggactcttgtgagaagactaatgagtccctcatccagaagatgccaatgtactggcagattaacatacaacctatgttttgaacaaaaacaaccagcgatacgtaatcaaaatgtaattttcccctaataaaattatggatatgggcagtcatcaatggctgccaaaaccattaagtggaaagctgattaaaaaacaaaaatttctaatggatttatcaaactgtcccaaatcctgataaatattaacatcacagaggaagaccagacattatgggcctggaagtactataggagtgcacacatcacccgtgacatggtcttgccaaataattaaacctgaatttgatcaggtctctggatcttatttgcaattcaaaagaaattttaaaaaaatcctactaacaccaccacaaatatgcaatcagcaatatccagaaaggggaaattcacaggacaaaaacctggttttcttttttggtttcttcaaccaaaaaagaaagaaattgcaaaggaccaaaaaaatgttggggaatctatacattataagggacttaacaactaaagggcaacatatagactttagatcctaatttgagcaaaatctaaaatcaattattaggcaatcagaaaaatttgaacacagactagatatttgaggatattaaggtactatattattgaagattccatggttatgttttttaaagagttcatgccttttagagatacatactaaagtatttgtaaataaatgacatgatctagaaaaaaaaaaaaaaaa

SEQ ID NO: 1318 - protein, 630 aa, Homo sapien
MGTYSTILIKTEVIECGNYCGVRIIHSLIAEFSLEELKKSYHLNKSQIMLDMLTENLFFDTGMGKSKFLQDMHTLLLTRHRDEHEGETGNWFSPFIEALHKDEGNEAVEAVLLESIHRFNPNAFICQALARHFYIKKKDFGNALNWAKQAKIIEPDNSYISDTLGQVYKSKIRWWIEENGGNGNISVDDLIALLDLAEHASSAFKESQQQSEDREYEVKERLYPKSKRRYDTYNIAGYQGEIEVGLYTIQILQLIPFFDNKNELSKRYMVNFVSGSSDIPGDPNNEYKLALKNYIPYLTKLKFSLKKSFDFFDEYFVLLKPRNNIKQNEEAKTRRKVAGYFKKYVDIFCLLEESQNNTGLGSKFSEPLQVERCRRNLVALKADKFSGLLEYLIKSQEDAISTMKCIVNEYTFLLEQCTVKIQSKEKLNFILANIILSCIQPTSRLVKPVEKLKDQLREVLQPIGLTYQFSEPYFLASLLFWPENQQLDQHSEQMKEYAQALKNSFKGQYKHMHRTKQPIAYFFLGKGKRLERLVHKGKIDQCFKKTPDINSLWQSGDVWKEEKVQELLLRLQGRAENNCLYIEYGINEKITIPITPAFLGQLRSGRSIEKVSFYLGFPIGGPLAYDIEIV

SEQ ID NO: 1319 - DNA, 1306 bp, Homo sapien
taatcttgaagaacggcacagtggtatgggccacaagcatactttatgtgtgtaacggactgaaagacaaatcaatcttggtgaaaggatttttcatctcttatttctatttgccagtgttagtcagtgttctgctggcttagattattacctttttctggttccttactgtgttttattctgatgggtcctagaaatccctctcctgaccacttgtcagaatcagaaagtgaggaagaagaaaatattagttacctaaatgagagttctggggaagagtgggattcctctgaagaagaggactctatggtgcccaacttatcgcctcttgagagtcttgcctggcaggttaagtgccttttaaaatattccacaacttggaaacctttaaatcctaattcctggttgtatcatgctaaactgttggatccaagcacaccagtccatatacttcgagagataggtctaagactctcccattgttcccattgtgtccccaaactggaaccaattcctgaatggccccctctggcctcttgtggagtcccaccttttcaaaagcctcttacaagtcccagccggctctctagagatcatgccactctaaatggagcactgcaatttgccaccaaacagctaagccgaacattgagtagagccactcccatacctgaatacctaaaacagatccctaattcatgtgtttctgggtgttgctgtggctggctgactaaaacagttaaggaaacaactcgtactgaacccatcaacactacttattcttacactgacttccaaaaggcagttaacaaactcctaactgcatcactgtaaagatctaccatttgctctgatatctctgatgttgctaattgagaaagtggtacaaagttagtcattacacagcccactaatgccttctcagtcaaactctcttatgccctggcaagccaatgaggataccctttgacaaaccctgtggataaaatgataatatcaaggtcaggcatggtggctcacacctgtaatcccagcactttgggaggctgaggcgggtggatctgctgaagtcagaagtttgagaccagccttgccaacacagtgaaaccctgtctctactaaaaataaaaaaattagccgggcgcagcagtgcacgcctgtaatccctgctactcgggaggctgaaacaggagaatcacttgaacccaggagacggaggttgcggtgagttgagattatgccactgtactccagcctgggtgacagagcgagactcagtctcaaaaaaaaaaaaaaaaaaaaaaaa

SEQ ID NO: 1320 - protein, 216 aa, Homo sapien
MGPRNPSPDHLSESESEEEENISYLNESSGEEWDSSEEEDSMVPNLSPLESLAWQVKCLLKYSTTWKPLNPNSWLYHAKLLDPSTPVHILREIGLRLSHCSHCVPKLEPIPEWPPLASCGVPPFQKPLTSPSRLSRDHATLNGALQFATKQLSRTLSRATPIPEYLKQIPNSCVSGCCCGWLTKTVKETTRTEPINTTYSYTDFQKAVNKLLTASL

SEQ ID NO: 1321 - DNA, 1336 bp, Homo sapien
agcacagtcccgcggacggctgagcgtgtggctgcaggagcttctgtgggagtacggtcatgagccttttgctgtactatgccctccctgccctgggcagctatgccatgctctccatcttcttcctgcgccggcctcatctgctgcacacgcccagggctcccaccttccgcatccgcctgggggcccaccgaggaggatctggagagctgctggagaacaccatggaggccatggagaagtgagtgtatctgcccctgcccaggctgccatgtgagggtgtgcaggtcgtggactgcatcacagcaagggacgccattcacttcctagctgggtgactggcgccccctggaggtggcctgcacatcccgccacgaactccgctctcacattcccggccacctcccagccaccatgcccctcatcccagtcccctgcccctgccccccgctgaccttcacccccacagctccatggcccagcgctcggacctcctggagctcgactgtcagctgacacgggacagagtggtggtggtgtcacatgatgagaacctgtgccgccagtcgggcctaaacagggatgtgggcagcctggacttcgaggacctgcccctctacaaggagaagctggaggtttacttctctccaggccactttgctcacgggtcagaccggcgcatggttcgtctggaggacctgttccagaggtttccaaggacacccatgagcgtagagatcaaagggaagaacgaagagctcatccgtgagatagcaggcttggtgagacgctatgaccgtaatgaaatcaccatctgggcctcggagaagagctcggtcatgaagaaatgcaaggctgccaaccccgagatgcccctgtccttcacaataagccgaggattctgggtgctgctttcctactacctggggctgctgcccttcatcccaatccctgagaagttcttcttctgcttcctgcccaacatcatcaacaggacctatttcccattttcctgctcttgcctgaaccagttattggctgtggtttcgaaatggctgatcatgaggaagagtctgatccgacacttggaggagcgaggggtgcaggtggtcttttggtgccttaatgaagagtcggattttgaagcagccttcagcgtgggagccactggcgtcataacggattatcccacagccctgcggcactacctggacaaccatggaccagctgcccggacctcctaagtccagaagcctcgaggtcttctgtttctcttcctgaaaaataaatatttgcctttcgatcaaaaaaaaaaaaaaaaaaaaaaaaaaaaaaa

SEQ ID NO: 1322 - protein, 256 aa, Homo sapien
MAQRSDLLELDCQLTRDRVVVVSHDENLCRQSGLNRDVGSLDFEDLPLYKEKLEVYFSPGHFAHGSDRRMVRLEDLFQRFPRTPMSVEIKGKNEELIREIAGLVRRYDRNEITIWASEKSSVMKKCKAANPEMPLSFTISRGFWVLLSYYLGLLPFIPIPEKFFFCFLPNIINRTYFPFSCSCLNQLLAVVSKWLIMRKSLIRHLEERGVQVVFWCLNEESDFEAAFSVGATGVITDYPTALRHYLDNHGPAARTS

SEQ ID NO: 1323 - DNA, 4507 bp, Homo sapien
tcagcggcagcagccgccgccgagatgtcccggcgaaagcaaagcaaaccccggcagatcaaacggccgcttgaagatgccattgaagatgaggaagaagaatgtccatcagaggaaacagacatcatctccaaaggagactttccattggaggaaagcttttccacagaatttgggcctgaaaatctgagctgcgaagaagtggaatacttttgtaacaaaggtgatgatgaaggaatccaggagacagcagaatcagatggggacacacagtcagagaaaccggggcaacctggagttgagacagacgactgggatggaccaggagagctggaggtgtttcagaaagatggggaacgaaaaattcagagtcgacagcaacttccagtgggaacaacctgggggccgtttcctgggaagatggacttgaataataattctttgaagacaaaggctcaggtcccaatggtgctgactgctggtcccaagtggttgctggatgtgacttggcaaggagtggaagacaacaaaaacaactgcattgtgtacagcaaagggggtcagctttggtgtacaactacgaaggccatctctgagggtgaagagctaattgcctttgtggtggattttgactcaaggctacaagctgccagtcagatgactctcacagaagggatgtaccctgcacgcctgctggactcaattcagctgcttcctcagcaagctgccatggcttctattttgcccacagctattgtcaataaggatatattcccttgcaagtcctgtggcatctggtatcggagtgagcggaatctgcaggcccatttgatgtactactgcagtgggaggcaaagagaagctgctccggtgtcagaggaaaatgaagacagtgcccatcagatttccagcctgtgccccttcccacagtgcaccaagagcttttcaaatgctcgagctctagaaatgcacctgaattcacacagtggagtgaaaatggaagaattcctgccccctggtgctagtctaaaatgcaccgtctgtagctacactgctgattccgtgatcaactttcaccaacacctgttctcccatctcactcaagctgccttccgatgtaatcactgccatttcggcttccagactcagagggagttattgcagcaccaggagctccatgtccctagcggcaaacttcccagagaaagtgacatggaacactctccaagtgcaactgaagacagcttacagccagccacagacttattgaccagaagcgaacttccccagagccaaaaggccatgcagactaaagatgcgagctctgacacagagctggacaagtgtgagaaaaagactcagctctttctcacgaaccagagaccagagatacagcctacaacaaataaacaaagcttttcttacacaaaaataaagtctgagccctctagcccaagacttgcctcatctccagttcagcctaatattgggccttctttccctgtgggccctttcctatctcagttttctttcccccaagatatcaccatggtccctcaagcttcagagatcttagctaagatgtctgaactggtgcatcggcgactgaggcatggcagtagtagctaccctcccgtcatttacagccctttgatgcccaagggggctacttgttttgagtgtaacataacattcaataatttggataattatctagtgcacaaaaagcattattgcagcagccgatggcagcagatggctaagtccccagagttccctagtgtgtcagaaaagatgcctgaagctttgagtcccaacactggccaaacctccataaaccttctcaacccagctgctcattctgctgatcctgagaatccacttcttcaaacatcttgcatcaattcttccactgtcttagatttaattgggccaaatgggaagggccatgacaaggacttttccactcaaactaagaagctctccacctccagtaacaatgatgacaaaattaatggaaaacctgttgatgtgaaaaatcccagtgtccccttagtggatggggaaagtgacccaaataagactacctgtgaagcttgcaacattaccttcagccggcacgaaacatacatggtccacaaacagtattactgtgctacacgccacgaccctccactgaagaggtctgcttccaacaaagtgcctgccatgcagagaaccatgcgcacacgcaagcgcagaaagatgtatgagatgtgcctacctgagcaggaacaaaggcctccactggttcagcagagatttcttgacgtagccaacctcaataatccttgtacctccactcaagaacccacagaagggctaggagagtgctaccacccaagatgtgatatctttccaggaattgtctctaaacacttggaaacttctctgacgatcaacaagtgtgttccagtttccaaatgtgatactactcattccagtgtttcctgcctagagatggacgtgcccatagatctcagcaaaaagtgtttatctcagtctgagcggacgaccacgtctcccaaaaggctgctggactatcacgagtgcactgtgtgcaagatcagtttcaataaggtagaaaactatctggcccacaagcagaatttctgcccggttactgcacatcagcgtaatgacctgggtcaactggacggcaaagtgtttccgaatccagaaagcgaacgaaacagccctgatgtcagctacgaaagaagcataataaaatgtgagaaaaatgggaatttgaagcagccttcccccaatggaaacttattttcatcccacctagcaaccccgcaaggcttgaaggtctttagtgaagctgctcagctcattgctacaaaagaagaaaacagacatttgtttcttccacaatgcctttaccctggagcaataaagaaagcaaaaggagccgaccagctttctccatattatggaatcaagccaagtgattatatttctggttctcttgtcatccataacactgacatcgagcaaagcagaaatgcagaaaatgaatctcctaaaggccaggcttcctcaaatgggtgtgctgcgctgaagaaagattctctgccattgttgcccaaaaatcgaggaatggtaatagtgaatggtggactgaaacaagatgagagacctgctgccaacccacagcaagagaacatttcccagaatcctcagcacgaagacgaccacaaatctccctcgtggatctctgagaacccattagctgccaatgagaatgtctcaccaggaattccctcagcagaggaacagttgtctagtatagcaaaaggtgtgaatggttccagccaggctccaaccagtgggaaatattgccggctatgtgatatccagttcaacaacctttcaaactttataactcacaagaagttttattgctcatcacatgcagcagaacatgtcaaatgaactaactaaacatcagtcacctttggtatcagtgtttagtatgttgttctaaccagtccagaaaaaaaaataagctgtttgaattacatctgggcaatcaggagataattcattatggctgagttgaagacttaaggtgtaatttcattacagtccattagtaaagtgtattattggtgccattttcaaaaaaattaatttattttaccagcagtattcatagctgtggttatgttattttttatttaaaaactttatattaaagtcatttgtaatgttattgtatagttattgtgtagcacatatggtttgcactgtatagtagcttttaaagaaaatagtcacaatacagaaaagcattttagaaatagcttcaaaagcacttgtgtatcttgattttttcttatatgctgttgcagatatatgtatatgctaaaatataacttgcaaagatgttctaaatacacatgctataagttcgccttaagatttcaattcttggataatcaggctctgtttgcactttatattttagcagatacagtctcttagtcactaggctttgcatttgtatgtagctgtatgtttccgtccattttcttaatcctgaacctgtatgttaaatgaagatggcaatttttttcttgtatagtacttgtattttctttcgctgatgcagctctgtctcaatttttaaacctttgctgttaaatgcaatactttataaagaatgaacaaaattactggaagcagtattgtaagtaatgaggtagtattaatcagttttatcttttgaaaggcacagtctaaatcgaaaccctaaactcaatgctgcaagtatgaatttaattcatatataagatctatttaaatataagagtagcaatactgcacctggtgatcacaaagataatgttctacttctgatagaaataatttctcaacaaatgttgttactatgcatgtatatggatggaataaaattccagattgttggagaaaaaaaaaaaaaaaaaaaaaaaaaaaa

SEQ ID NO: 1324 - protein, 1151 aa, Homo sapien
MSRRKQSKPRQIKRPLEDAIEDEEEECPSEETDIISKGDFPLEESFSTEFGPENLSCEEVEYFCNKGDDEGIQETAESDGDTQSEKPGQPGVETDDWDGPGELEVFQKDGERKIQSRQQLPVGTTWGPFPGKMDLNNNSLKTKAQVPMVLTAGPKWLLDVTWQGVEDNKNNCIVYSKGGQLWCTTTKAISEGEELIAFVVDFDSRLQAASQMTLTEGMYPARLLDSIQLLPQQAAMASILPTAIVNKDIFPCKSCGIWYRSERNLQAHLMYYCSGRQREAAPVSEENEDSAHQISSLCPFPQCTKSFSNARALEMHLNSHSGVKMEEFLPPGASLKCTVCSYTADSVINFHQHLFSHLTQAAFRCNHCHFGFQTQRELLQHQELHVPSGKLPRESDMEHSPSATEDSLQPATDLLTRSELPQSQKAMQTKDASSDTELDKCEKKTQLFLTNQRPEIQPTTNKQSFSYTKIKSEPSSPRLASSPVQPNIGPSFPVGPFLSQFSFPQDITMVPQASEILAKMSELVHRRLRHGSSSYPPVIYSPLMPKGATCFECNITFNNLDNYLVHKKHYCSSRWQQMAKSPEFPSVSEKMPEALSPNTGQTSINLLNPAAHSADPENPLLQTSCINSSTVLDLIGPNGKGHDKDFSTQTKKLSTSSNNDDKINGKPVDVKNPSVPLVDGESDPNKTTCEACNITFSRHETYMVHKQYYCATRHDPPLKRSASNKVPAMQRTMRTRKRRKMYEMCLPEQEQRPPLVQQRFLDVANLNNPCTSTQEPTEGLGECYHPRCDIFPGIVSKHLETSLTINKCVPVSKCDTTHSSVSCLEMDVPIDLSKKCLSQSERTTTSPKRLLDYHECTVCKISFNKVENYLAHKQNFCPVTAHQRNDLGQLDGKVFPNPESERNSPDVSYERSIIKCEKNGNLKQPSPNGNLFSSHLATPQGLKVFSEAAQLIATKEENRHLFLPQCLYPGAIKKAKGADQLSPYYGIKPSDYISGSLVIHNTDIEQSRNAENESPKGQASSNGCAALKKDSLPLLPKNRGMVIVNGGLKQDERPAANPQQENISQNPQHEDDHKSPSWISENPLAANENVSPGIPSAEEQLSSIAKGVNGSSQAPTSGKYCRLCDIQFNNLSNFITHKKFYCSSHAAEHVK

SEQ ID NO: 1325 - DNA, 4520 bp, Homo sapien
taggaacaggggagagtgcacctgctaccagtcaagctcagccagactgcaagaggaggcgaggcggagccagccgagggagtgaaccatggacaagttgaaatgcccgagtttcttcaagtgcagggagaaggagaaagtgtcggcttcatcagagaatttccatgttggtgaaaatgatgagaatcaggaccgtggtaactggtccaaaaaatcggattatcttctatctatgattggatacgcagtgggattaggaaatgtgtggagatttccatatctgacctacagcaatggtggaggcgccttcttgataccttatgcaattatgttagcattggctggtttacctttgttctttctggagtgttcactgggacaatttgctagcttaggtccagtttcagtttggaggattcttccattgtttcaaggtgtgggaattacaatggtcctgatctccatttttgtgacaatctattacaatgtcataattgcctatagtctttactacatgtttgcttcttttcaaagtgaactaccatggaaaaattgttcttcgtggtcagataaaaactgtagcagatcaccaatagtaactcactgtaatgtgagtacagtgaataaaggaatacaagagatcatccaaatgaataaaagctgggtagacatcaacaattttacctgcatcaacggcagtgaaatttatcagccagggcagcttcccagtgaacaatattggaataaagtggcgctccaacggtcaagtggaatgaatgagactggagtaattgtttggtatttagcactttgtcttcttctggcttggctcatagttggagcagcactatttaaaggaatcaaatcgtctggcaaggtggtatattttacagctcttttcccctatgtggtcctactcatcctgttagtacgaggtgcaactctggagggtgcttcaaaaggcatttcatactatattggagcccagtcaaattttacaaaacttaaggaagctgaggtatggaaagatgctgccactcagatattttactccctttcagtggcttggggtggcttagttgctctatcatcttacaataagttcaaaaacaactgcttctctgatgccattgtggtttgtttgacaaactgtctcactagcgtgtttgctggatttgctattttttctatattgggacacatggcccatatatctggaaaggaagtttctcaagttgtaaaatcaggttttgatttggcattcattgcctatccagaggctctagcccaactcccaggtggtccattttggtccatattattttttttcatgcttttaactttgggtctcgattctcagtttgcttcgattgaaacgatcacaacaacaattcaagatttatttcccaaagtgatgaagaaaatgagggttcccataactttgggctgctgcttggttttgtttctccttggtctcgtctgtgtgactcaggctggaatttactgggttcatctgattgaccacttctgtgctggatggggcattttaattgcagctatactggagctagttggaatcatctggatttatggagggaacagattcattgaggatacagaaatgatgattggagcaaagaggtggatattctggctatggtggagagcttgctggtttgtaattacgcctatccttttgattgcaatatttatctggtcattggtgcaatttcatagacctaattatggcgcaattccataccctgactggggagttgctttaggctggtgtatgattgttttctgcattatttggataccaattatggctatcataaaaataattcaggctaaaggaaacatctttcaacgccttataagttgctgcagaccagcttctaactggggtccatacctggaacaacatcgtggggaaagatataaagacatggtagatcctaaaaaagaggctgaccatgaaatacctactgttagtggcagcagaaaaccggaatgagatctcattgaaaaaaatatatgattgtataatgtgattttttttagaatagggggaaccttatttatttgtgtgttaactgaataggaaaatgtacatactatgttcatgatagtgtgatttttttcacatttaagcaggaatgcaatataaaaatgtgaatctcttaattctcagccatgtgcttattatatttctttttagattgtctatctgtataacacacacacacacacctaagagtctctatttcacaattatatttttgtaaatagtatatgcatttttaatacattggaggctttattttgaactaatttcttagagaatagttatattttctattacacaagtttaaaaatattattaacttgtattttcttaatatacaatctatcttttccacaaatatgagtgggaaataaatcagcacatttgaaagaaagtgttaaaactgaaggcctcacttaattagaaacgtgataaatatatggacaaatggactatacatactataagaggactgtagtttaatactttttacccaaatatgtttaaaaacatcgtgcatttgttacagctcatgttttctatatgaacttagtcattaatgttctttataaaaagtgaaataagatggaaaaattaggatcctacagccagtacgtgataaatctagaaaattgagttttgagtacctcttttcccatatacaatcttccttccttaggtaatttggaagaaaactatgacccatttaatttctattgtgtttcaccaaattcagtgttgttcattatacctctctgaaatataggtttaatttcaaatagaatatggacttaaatgttaatgagaaactggctttaatcaattctagcattttattactgtaatacagggctgatagagtgattttgtcttatatgagtcagttactacttacaggtgataacttgcatactattggaagataaagttgtcaaacttgtcaagaatgagaaaagccaaattagaaaatcctatgtcctagtttccttaccaaggataattaaatatatcactaagagctttatatattgattatatattgttgacaactggtttaagcatcatagcctatgatgataaacactgcctatatatgtaaatagcttttcatcaattcttaaatttcttaacctaggcttcagggagcatatgaaaccaaaattatatggaacattttctgtgtgtacatgtacatgcatttttctagggagagagtccgtaggtttatcagaatatcaaggaaaactgtgacccaaagaagtttaagaatcacatacagtgctgctggctttttgtgcttggcaaatgagtgacaatagaagaaataatttttcttacacattttaaaacgttttctcttccttgtgattgaagatgaaaggagtaagaaattaaggcatttgtttaatttatactggtaacttatttaggggggaggggacatgaaggtaggtaaataggtaggcctctaattgaaccacctctctaagttatgtacgtatatataagctgaaattgtgtttgacattctgagggttttctttttctttttcctttttttttttttttggtggggggctgggggtcagagtcttgttctgttgcctgggctggagtgcagtggcatgatctcagctcactgcaacctctgccttctggattcaagtgattctcctgcctcagcctcttgagtagctgggactacaggtgcccgccaccacaccagctaatttttgtatttttagtagaggcgaagtttccccatgttggccaggctggtcttgaactcccgacctcaagtgatctgtctacctcggcctcctaaagtgctgagattacaggtgtgagccaccgtgcccggcccattctaagggttttctttgaagacaggtcaaatgctgttagtaagtttcaggagattgttaattcctcagttataccagattttataaaatatttgagaatagatggctaacaagaggttagaaatacttttccttaattttaatccacagtatgttacatgcattctaccactacattttggtgctatttaaggtgtgcaattttctataggtgacttttgcaattcagggaagatttgggcatattaaatgaaagaatatctaattgggggaggtgtgaagggaaagaaattcttttcaaaagctgaccacaaagagtagttaaaagtttttgtcactatcttcacaagtgtgtaaagcacagatttcaacagagtgcttggcatattgtagggtgctcaatggtggtttttattattattactcagattccacagtggcaagaaacatcattctacataatggaaaacatttacatcaaatcccacttactttaatgcgaacttggagataatttatggtattgtattgtaaaccattaatgaaaactttttcacagttgagtgaaattaaaatcactatatctc

SEQ ID NO: 1326 - protein, 642 aa, Homo sapien
MDKLKCPSFFKCREKEKVSASSENFHVGENDENQDRGNWSKKSDYLLSMIGYAVGLGNVWRFPYLTYSNGGGAFLIPYAIMLALAGLPLFFLECSLGQFASLGPVSVWRILPLFQGVGITMVLISIFVTIYYNVIIAYSLYYMFASFQSELPWKNCSSWSDKNCSRSPIVTHCNVSTVNKGIQEIIQMNKSWVDINNFTCINGSEIYQPGQLPSEQYWNKVALQRSSGMNETGVIVWYLALCLLLAWLIVGAALFKGIKSSGKVVYFTALFPYVVLLILLVRGATLEGASKGISYYIGAQSNFTKLKEAEVWKDAATQIFYSLSVAWGGLVALSSYNKFKNNCFSDAIVVCLTNCLTSVFAGFAIFSILGHMAHISGKEVSQVVKSGFDLAFIAYPEALAQLPGGPFWSILFFFMLLTLGLDSQFASIETITTTIQDLFPKVMKKMRVPITLGCCLVLFLLGLVCVTQAGIYWVHLIDHFCAGWGILIAAILELVGIIWIYGGNRFIEDTEMMIGAKRWIFWLWWRACWFVITPILLIAIFIWSLVQFHRPNYGAIPYPDWGVALGWCMIVFCIIWIPIMAIIKIIQAKGNIFQRLISCCRPASNWGPYLEQHRGERYKDMVDPKKEADHEIPTVSGSRKPE

SEQ ID NO: 1327 - DNA, 4445 bp, Homo sapien
atgctctttgagggcttggatctggtgtcggcgctggccaccctcgccgcgtgcctggtgtccgtgacgctgctgctggccgtgtcgcagcagctgtggcagctgcgctgggccgccactcgcgacaagagctgcaagctgcccatccccaagggatccatgggcttcccgctcatcggagagaccggccactggctgctgcagggttctggcttccagtcgtcgcggagggagaagtatggcaacgtgttcaagacgcatttgttggggcggccgctgatacgcgtgaccggcgcggagaacgtgcgcaagatcctcatgggcgagcaccacctcgtgagcaccgagtggcctcgcagcacccgcatgttgctgggccccaacacggtgtccaattccattggcgacatccaccgcaacaagcgcaaggtcttctccaagatcttcagccacgaggccctggagagttacctgcccaagatccagctggtgatccaggacacactgcgcgcctggagcagccaccccgaggccatcaacgtgtaccaggaggcgcagaagctgaccttccgcatggccatccgggtgctgctgggcttcagcatccctgaggaggaccttgggcacctctttgaggtctaccagcagtttgtggacaatgtcttctccctgcctgtcgacctgcccttcagtggctaccggcggggcattcaggctcggcagatcctgcagaaggggctggagaaggccatccgggagaagctgcagtgcacacagggcaaggactacttggacgccctggacctcctcattgagagcagcaaggagcacgggaaggagatgaccatgcaggagctgaaggacgggaccctggagctgatctttgcggcctatgccaccacggccagcgccagcacctcactcatcatgcagctgctgaagcaccccactgtgctggagaagctgcgggatgagctgcgggctcatggcatcctgcacagtggcggctgcccctgcgagggcacactgcgcctggacacgctcagtgggctgcgctacctggactgcgtcatcaaggaggtcatgcgcctgttcacgcccatttccggcggctaccgcactgtgctgcagaccttcgagcttgatggtttccagatccccaaaggctggagtgtcatgtatagcatccgggacacccatgacacagcgcccgtgttcaaagacgtgaacgtgttcgaccccgatcgcttcagccaggcgcggagcgaggacaaggatggccgcttccattacctcccgttcggtggcggtgtccggacctgcctgggcaagcacctggccaagctgttcctgaaggtgctggcggtggagctggctagcaccagccgctttgagctggctacacggaccttcccccgcatcaccttggtccccgtcctgcaccccgtggatggcctcagcgtcaagttctttggcctggactccaaccagaacgagatcctgccggagacggaggccatgctgagcgccacagtctaacccaagacccacccgcctcagcccagcccaggcagcggggtggtggttgtgggaggtagaaacctgtgtgtgggagggggccggaacggggagggcgagtggcccccatacttgccctcccttgctccccctccctggcaaaccctacccaaagccagtgggccccattcctagggctgggctccccttctggctccagcttccctccagccactccccatttaccatcagctcagcccctgggaagggcgtggcaggggctctgcatgcccgtgacagtgttaggtgtcagcgcgtgctacagtgtttttgtgatgttctgaactgctcccttccctccgttcctttcggacccttttagctggggttgggggacgggaagagccgtgcccccttgggcgcactcttcagcgtctcctcctcctgcgcccccactgcgtctgcccaggaacagcatcctgggtagcagaacaggagtcaaccttggcggggcgggggctgcgtccaacctggagattgcccttccctatgccacggttcccaccctccctcaccagtttggacaatttgaaattacctattgctgctacttgttctgtcctctgaccttggggcaaaggagccccaggccctgtctccccagcatcctccctggtggccctgggcaggtgcactgacacccccaccttcccatcccctgctgaaccaggccctgttacacacagccgcctaaggcccgcggctcatgtgctgcccgcccccatatttattcactgatagagaatcttggggatgctggggtctggagtgaacatctcctccccttcatgccctagcctgtgttctagctgtcctggcgagacttctgtgagtgaagaggaaggggtctctggtcaaacccagcccccagggcctagggttgaaagccttccccggctccgggcattatttgggtttaatctcggagcctcactcctggactgaagtccggtgcctctgccttatccctggtggagatggaatgtggcccattgcctcctccctctcctgtcaaaaaccctgatcaggtagatttggaggcggccacgatttcctgtttggcccctgttcaccccagtgcactggccctgactccaggcgtgagtatggggaaggatacgggttcttctgacggggagcaagggcctccgtcttcccttccttaactctccccctttgccctccgccctgaaaaaggtgtccttgaagtcccttccacctctatgccactgtctgcttagcccagctcaggggtggggaagaggcgaaagcgtgggggaggtgagcgcagcggcagttctgcctcggagctgattgcagggccctgtgtggtctccggacagctgcgggaaggctgccgcagctgaagctgaagaggcggctacgtgcggtttgtcagggggattgggttgaaaactggccagtcgggatgactgggtgaaagaggagtagctcctgccactggcgttttgagtgttggcaatttgggatgcctcctggggaaggtttccgggcgtttggtgagtctctagatttttccttgctttctgtgtttattggtttttgatgttgtaaaagcaatgaatcccctttacaagaaaatcgaaaacacagaagaatgaaggacatgccagtccccgatcgctgctgtgagcacctcagtggctccctcagaccagatcccgtaggcagccccacagaccgaccctgaccccactcacagccaccctgaagatagactataggaacgggcccataccacacagactgctctccaatccctgagtctcagatgtttcatttatttcctacttttccactactaaaaaacagtgtggaatagacattattggcaaaattgctcatccctaatcctgaaaaacaggccagaatgggtaaagacttgtcaaagcttgcaacatagctacatggtgcacccggacctgtaccccctccccccaacacaaaaccagtgtctgggaggttcattttcctttaaactgatccagctggccctgaaccaattgtttttgactgagtatctaggagagcagtaagtggaacttcagacaagcccactgggtctggtccaggtgaggggcagggggcatggggctgggaggtctcaggggccttccctgggggtggccagcctggtagggggcagagaaggaaaagctgaggggggtccctgtgagggaggaaagaaggatcatttgccccgctgggtctcaaaggcagtgagaagagagctgaagaaagctctggctggctgacaggatccctgtgttgtaattggtccctcctttcagctctctagtgagatgcccgtgtctgtgcgtgtgcgtgtgtgtttcatacagctagcattagatgggtgatgtttcttacttatcatccctaactattgcaacttgaccttaaaaagacaaaaccccacaaaactcttcctgccacgggcttgcagattgaagcactttcgatgttgggcgctggcgtttgtgttctgggcaccaccgtgaccctgcccagatggctataatattattttatacacaaaccttttttttcataaatgttataattttgtgtctgtctttataaactattataagtactatttttgttataattcaaaatagatatttagtataaagtttttgctgttaaatatttgttatttagtaaaatatgaattttgctctattgtaaacatggttcaaaatattaatatgtttttatcacagtcgttttaatattgaaaaagcacttgtgtgttttgttttgatatgaaactggtaccgtgtgagtgtttttgctgtcgtggttttaatctgtatataatattccatgttgcatattaaaaa

SEQ ID NO: 1328 - protein, 512 aa, Homo sapien
MLFEGLDLVSALATLAACLVSVTLLLAVSQQLWQLRWAATRDKSCKLPIPKGSMGFPLIGETGHWLLQGSGFQSSRREKYGNVFKTHLLGRPLIRVTGAENVRKILMGEHHLVSTEWPRSTRMLLGPNTVSNSIGDIHRNKRKVFSKIFSHEALESYLPKIQLVIQDTLRAWSSHPEAINVYQEAQKLTFRMAIRVLLGFSIPEEDLGHLFEVYQQFVDNVFSLPVDLPFSGYRRGIQARQILQKGLEKAIREKLQCTQGKDYLDALDLLIESSKEHGKEMTMQELKDGTLELIFAAYATTASASTSLIMQLLKHPTVLEKLRDELRAHGILHSGGCPCEGTLRLDTLSGLRYLDCVIKEVMRLFTPISGGYRTVLQTFELDGFQIPKGWSVMYSIRDTHDTAPVFKDVNVFDPDRFSQARSEDKDGRFHYLPFGGGVRTCLGKHLAKLFLKVLAVELASTSRFELATRTFPRITLVPVLHPVDGLSVKFFGLDSNQNEILPETEAMLSATV

SEQ ID NO: 1329 - DNA, 2590 bp, Homo sapien
ccccatccctataggagctggtgagattgcagcctgctgcctcccctccatcaaccacagctattggatttcccacccagaatctttaggtaaatgagatcatgattctggaaggaggtggtgtaatgaatctcaaccccggcaacaacctccttcaccagccgccagcctggacagacagctactccacgtgcaatgtttccagtgggttttttggaggccagtggcatgaaattcatcctcagtactggaccaagtaccaggtgtgggagtggctccagcacctcctggacaccaaccagctggatgccaattgtatccctttccaagagttcgacatcaacggcgagcacctttgcagcatgagtttgcaggagttcacccgggcggcagggacggcggggcagctcctctacagcaacttgcagcatctgaagtggaacggccagtgcagtagtgacctgttccagtccacacacaatgtcattgtcaagactgaacaaactgagccttccatcatgaacacctggaaagacgagaactatttatatgacaccaactatggtagcacagtagatttgttggacagcaaaactttctgccgggctcagatctccatgacaaccaccagtcaccttcctgttgcagagtcacctgatatgaaaaaggagcaagacccccctgccgagtgccacaccaaaaagcacaacccgagagggactcacttatgggaattcatccgcgacatcctcttgaacccagacaagaacccaggattaataaaatgggaagaccgatctgagggcgtcttcaggttcttgaaatcagaggcagtggctcagctatggggtaaaaagaagaacaacagcagcatgacctatgaaaagctcagccgagctatgagatattactacaaaagagaaattctggagcgtgtggatggacgaagactggtatataaatttgggaagaatgcccgaggatggagagaaaatgaaaactgaagctgccaatactttggacacaaaccaaaacacacaccaaataatcagaaacaaagaactcctggacgtaaatatttcaaagactacttttctctgatatttatgtaccatgaggggaacaagaaactacttctaacgggaagaagaaacactacagtcgattaaaaaaattattttgttacttcgaagtatgtcctatatggggaaaaaacgtacacagttttctgtgaaatatgatgctgtatgtggttgtgattttttttcacctctattgtgaattctttttcactgcaagagtaacaggatttgtagccttgtgcttcttgctaagagaaagaaaaacaaaatcagagggcattaaatgttttgtatgtgacatgatttagaaaaaggtgatgcatcctcctcacataagcatccatatggcttcgtcaagggaggtgaacattgttgctgagttaaattccagggtctcagatggttaggacaaagtggatggatgccgggaagtttaacctgagccttaggatccaatgagtggagaatggggacttccaaaacccaaggttggctataatctctgcataaccacatgacttggaatgcttaaatcagcaagaagaataatggtggggtctttatactcattcaggaatggtttatctgatgccagggctgtcttcctttctcccctttggatggttggtgaaatactttaattgccctgtctgctcacttctagctatttaagagagaacccagcttggttcttttttgctccaagtgcttaaaaataagttggaaaaaggagacggtggtgtggaaatggctgaagagtttgctcttgtatccctatagtccaaggtttctcaatctgcacaattgacatttttggccggagtgttctttgtggtgagggctttcctgtgcattgtaagatgttcagcagtatccactcatggtctctaaccacttgacaccagaaaccccccagctgtgataacgcaaaatgtctctagacatcaccaaatgttccctgggggtggcaaatttgcccttgattgagaaccaccagtttagctagtcaatatgaggatggtggtttattctcagaagaaaaagatatgtaagtcttttagctcctaagagtgaagcaaaagcaagacttcaacttcaacctatcttaatgttttaaatgttagggacaataagttgaaatagttagaggagcttcttttcagaaccccagatgagagccaatgtcagataaagtaagcatagcaatgtagcaggaactacaatagaagacattttcactggaattacaaagcagaattaaaattatattgtagaaggaaacaccaagaaaagaatttccagggaaaatcctctttgcaggtattaattcttataattttttgtcttttggattatctgtttactgtctcatctgaactgatcccaggtgaacggtttattgcctagatttgtactcagaggaattttttttgttttgttttgtcttctaagaaaggaaagaaaggatgaaaaaaataaacagaaaactcagctcaggcacaattgtc

SEQ ID NO: 1330 - protein, 300 aa, Homo sapien [sequence omitted]

SEQ ID NO: 1331 - DNA, 2414 bp, Homo sapien
gaaatctgtacgaactattcaggctgcttttagaggcatgaaagttagacaaaaattgaaaaatgtatcagaggaaaagatggcagccattgttaaccaatctgcactctgctgttacagaagcaaaactcagtatgaagctgttcaaagtgaaggtgttatgattcaagagtggtataaagcttctggccttgcttgttcacaggaagcagagtatcattctcaaagtagggctgcagtaacaattcaaaaagctttttgtagaatggtcacaagaaaactggaaacacagaaatgtgctgccctacggattcagttcttccttcagatggctgtgtatcggagaagatttgttcagcagaaaagagctgctatcactttacagcattattttaggacgtggcaaaccagaaaacagtttttactatatagaaaagcagcagtggttttacaaaatcactacagagcatttctgtctgcaaaacatcaaagacaagtctatttacagatcagaagcagtgttatcattattcaagctagaagtaaaggatttatacagaaacggaagtttcaggaaattaaaaatagcaccataaaaattcaggctatgtggaggagatatagagccaagaaatatttatgtaaagtgaaagctgcctgcaagattcaagcctggtatagatgttggagagcacacaaagaatatctagctgtattaaaagctgttaaaattattcaaggttgcttctataccaaactagagagaacacggtttttgaatgtgagagcatcagcaattatcattcagagaaaatggagagctatacttcctgcaaagatagctcatgaacacttcttaatgataaaaagacatcgagctgcttgtttgatccaagcacattatagaggatataaaggaaggcaggtctctcttcggcagaaatctgctgctttgatcatacaaaaatatatacgagccagggaggctggaaagcatgaaaggataaaatatattgaatttaaaaaatctacagttatcctacaagcactggtgcgtggttggctagtacgaaaaagatttttagaacagagagccaaaattcgacttcttcacttcactgcagctgcatattatcacctgaatgctgttagaattcaaagagcctataaactttacctggctgtgaagaatgctaacaagcaggttaattcagtcatctgtattcagagatggtttcgagcaagattacaagaaaagagatttattcagaaatatcatagcatcaaaaagattgagcatgaaggtcaagaatgtctgagccagcgaaatagggctgcatcagtaatacagaaagcagtgcgccattttctcctccgtaaaaagcaggaaaaattcactagtggaatcattaaaattcaggcattatggagaggctattcttggaggaagaaaaatgattgtacaaaaattaaagctatacgactaagtcttcaagttgttaatagggagattcgagaagaaaacaaactctacaaaagaactgcacttgcacttcattaccttttgacatataagcacctttctgccattcttgaggccttaaaacacctagaggtagttactagattgtctccactttgttgtgagaacatggcccagagtggagcaatttctaaaatatttgttttgatccgaagttgtaatcgcagtattccttgtatggaagtcatcagatatgctgtgcaagtcttgcttaatgtatctaagtatgagaaaactacttcagcagtttatgatgtagaaaattgtatagatatactattggagcttttgcagatataccgagaaaagcctggtaataaagttgcagacaaaggcggaagcatttttacaaaaacttgttgtttgttggctattttactgaagacaacaaatagagcctctgatgtacgaagtaggtccaaagttgttgaccgtatttacagtctctacaaacttacagctcataaacataaaatgaatactgaaagaatactttacaagcaaaagaagaattcttctataagcattccttttatcccagaaacacctgtaaggaccagaatagtttcaagacttaagccagattgggttttgagaagagataacatggaagaaatcacaaatcccctgcaagctattcaaatggtgatggatacgcttggcattccttattagtaaatgtaaacattttcagtatgtatagtgtaaagaaatattaaagccaatcatgagtacgtaaagtgatttttgctctctgtgtacaacttttaaaatctgactttgttttaaaaaaacataaactgttcattacattcttcatttttatcatttatagttttatgcatgtaataaactaatatgtcataagatg

SEQ ID NO: 1332 - protein, 726 aa, Homo sapien
MKVRQKLKNVSEEKMAAIVNQSALCCYRSKTQYEAVQSEGVMIQEWYKASGLACSQEAEYHSQSRAAVTIQKAFCRMVTRKLETQKCAALRIQFFLQMAVYRRRFVQQKRAAITLQHYFRTWQTRKQFLLYRKAAVVLQNHYRAFLSAKHQRQVYLQIRSSVIIIQARSKGFIQKRKFQEIKNSTIKIQAMWRRYRAKKYLCKVKAACKIQAWYRCWRAHKEYLAVLKAVKIIQGCFYTKLERTRFLNVRASAIIIQRKWRAILPAKIAHEHFLMIKRHRAACLIQAHYRGYKGRQVSLRQKSAALIIQKYIRAREAGKHERIKYIEFKKSTVILQALVRGWLVRKRFLEQRAKIRLLHFTAAAYYHLNAVRIQRAYKLYLAVKNANKQVNSVICIQRWFRARLQEKRFIQKYHSIKKIEHEGQECLSQRNRAASVIQKAVRHFLLRKKQEKFTSGIIKIQALWRGYSWRKKNDCTKIKAIRLSLQVVNREIREENKLYKRTALALHYLLTYKHLSAILEALKHLEVVTRLSPLCCENMAQSGAISKIFVLIRSCNRSIPCMEVIRYAVQVLLNVSKYEKTTSAVYDVENCIDILLELLQIYREKPGNKVADKGGSIFTKTCCLLAILLKTTNRASDVRSRSKVVDRIYSLYKLTAHKHKMNTERILYKQKKNSSISIPFIPETPVRTRIVSRLKPDWVLRRDNMEEITNPLQAIQMVMDTLGIPY

SEQ ID NO: 1333 - DNA, 2881 bp, Homo sapien
atgaggctcctccgcagacgccacatgcccctgcgcctggccatggtgggctgcgcctttgtgctcttcctcttcctcctgcatagggatgtgagcagcagagaggaggccacagagaagccgtggctgaagtccctggtgagccggaaggatcacgtcctggacctcatgctggaggccatgaacaaccttagagattcaatgcccaagctccaaatcagggctccagaagcccagcagactctgttctccataaaccagtcctgcctccctgggttctataccccagctgaactgaagcccttctgggaacggccaccacaggaccccaatgcccctggggcagatggaaaagcatttcagaagagcaagtggacccccctggagacccaggaaaaggaagaaggctataagaagcactgtttcaatgcctttgccagcgaccggatctccctgcagaggtccctggggccagacacccgaccacctgagtgtgtggaccagaagttccggcgctgccccccactggccaccaccagcgtgatcattgtgttccacaacgaagcctggtccacactgctgcgaacagtgtacagcgtcctacacaccacccctgccatcttgctcaaggagatcatactggtggatgatgccagcacagaggagcacctaaaggagaagctggagcagtacgtgaagcagctgcaggtggtgagggtggtgcggcaggaggagcggaaggggttgatcaccgcccggctgctgggggccagcgtggcacaggcggaggtgctcacgttcctggatgcccactgtgagtgcttccacggctggctggagcccctcctggctcgaatcgctgaggacaagacagtggtggtgagcccagacatcgtcaccatcgaccttaatacttttgagttcgccaagcccgtccagaggggcagagtccatagccgaggcaactttgactggagcctgaccttcggctgggaaacacttcctccacatgagaagcagaggcgcaaggatgaaacataccccatcaaatccccgacgtttgctggtggcctcttctccatccccaagtcctactttgagcacatcggtacctatgataatcagatggagatctggggaggggagaacgtggaaatgtccttccgggtgtggcagtgtgggggccagctggagatcatcccctgctctgtcgtaggccatgtgttccggaccaagagcccccacaccttccccaagggcactagtgtcattgctcgcaatcaagtgcgcctggcagaggtctggatggacagctacaagaagattttctataggagaaatctgcaggcagcaaagatggcccaagagaaatccttcggtgacatttcggaacgactgcagctgagggaacaactgcactgtcacaacttttcctggtacctgcacaatgtctacccagagatgtttgttcctgacctgacgcccaccttctatggtgccatcaagaacctcggcaccaaccaatgcctggatgtgggtgagaacaaccgcggggggaagcccctcatcatgtactcctgccacggccttggcggcaaccagtactttgagtacacaactcagagggaccttcgccacaacatcgcaaagcagctgtgtctacatgtcagcaagggtgctctgggccttgggagctgtcacttcactggcaagaatagccaggtccccaaggacgaggaatgggaattggcccaggatcagctcatcaggaactcaggatctggtacctgcctgacatcccaggacaaaaagccagccatggccccctgcaatcccagtgacccccatcagttgtggctctttgtctaggacccagatcatccccagagagagcccccacaagctcctcaggaaacaggattgctgatgtctgggaacctgatcaccagcttctctggaggccgtaaagatggatttctaaacccactgggtggcaaggcaggaccttcctaatccttgcaacaacattgggcccattttctttccttcacaccgatggaagagaccattaggacatatatttagcctagcgttttcctgttctagaaatagaggctcccaaagtagggaaggcagctgggggagggttcagggcagcaatgctgagttcaagaaaagtacttcaggctgggcacagtggctcatgcctgaaatcctagcactttgggaagacaatgtgggagaatggcttgagcccaggagttcaagaccggcctgagcaacatagtgaggatcccatctctacgcccaccctccccccggcaaaaaaaaaagctgggtatggtggcttatgcctgtagtcgcagctactcagaaggctgaggtgggaggattgcttgttccccggaggttgaagctacagtgagccttgattgtgtcactgcactccagcctgggcaacaggtaagactctgtctcaaaaaaaaaacaaaaaagaagaagaaaagtacttctacagccatgtcctattccttgatcatccaaagcacctgcagagtccagtgaaatgatatattctggctgggcacagtggctcacacctgtaatcctagcactttgggaggccaaggcaggtggatcacctgaggtcagaagtttgaaaccagcctggactacatggtgaaactccatctctactaaaagtacaaaaattagctgggcatgatggcacgcacctgcagtcccagctacttgggaggctgaggcaggagaatcactcgaacccaggaggcagaggttgcagtgagccaagacagcaccattgcaccccagcctgagcaacaagagcgaaactccatctcaggaaaaaaaaaaaaaaaaa

SEQ ID NO: 1334 - protein, 622 aa, Homo sapien
MRLLRRRHMPLRLAMVGCAFVLFLFLLHRDVSSREEATEKPWLKSLVSRKDHVLDLMLEAMNNLRDSMPKLQIRAPEAQQTLFSINQSCLPGFYTPAELKPFWERPPQDPNAPGADGKAFQKSKWTPLETQEKEEGYKKHCFNAFASDRISLQRSLGPDTRPPECVDQKFRRCPPLATTSVIIVFHNEAWSTLLRTVYSVLHTTPAILLKEIILVDDASTEEHLKEKLEQYVKQLQVVRVVRQEERKGLITARLLGASVAQAEVLTFLDAHCECFHGWLEPLLARIAEDKTVVVSPDIVTIDLNTFEFAKPVQRGRVHSRGNFDWSLTFGWETLPPHEKQRRKDETYPIKSPTFAGGLFSIPKSYFEHIGTYDNQMEIWGGENVEMSFRVWQCGGQLEIIPCSVVGHVFRTKSPHTFPKGTSVIARNQVRLAEVWMDSYKKIFYRRNLQAAKMAQEKSFGDISERLQLREQLHCHNFSWYLHNVYPEMFVPDLTPTFYGAIKNLGTNQCLDVGENNRGGKPLIMYSCHGLGGNQYFEYTTQRDLRHNIAKQLCLHVSKGALGLGSCHFTGKNSQVPKDEEWELAQDQLIRNSGSGTCLTSQDKKPAMAPCNPSDPHQLWLFV

SEQ ID NO: 1335 - DNA, 1323 bp, Homo sapien
atgatcatcccctctctagaggagctggactccctcaagtacagtgacctgcagaacttagccaagagtctgggtctccgggccaacctgagggcaaccaagttgttaaaagccttgaaaggctacattaaacatgaggcaagaaaaggaaatgagaatcaggatgaaagtcaaacttctgcatcctcttgtgatgagactgagatacagatcagcaaccaggaagaagctgagagacagccacttggccatgtcaccaaaacaaggagaaggtgcaagactgtccgtgtggaccctgactcacagcagaatcattcagagataaaaataagtaatcccactgaattccagaatcatgaaaagcaggaaagccaggatctcagagctactgcaaaagttccttctccaccagacgagcaccaagaagctgagaatgctgtttcctcaggtaacagagattcaaaggtaccttcagaaggaaagaaatctctctacacagatgagtcatccaaacctggaaaaaataaaagaactgcaatcactactccaaactttaagaagcttcatgaagctcattttaaggaaatggagtccattgatcaatatattgagagaaaaaagaaacattttgaagaacacaattccatgaatgaactgaagcagcccatcaataagggaggggtcaggactccagtacctccaagaggaagactctctgtggcttctactcccatcagccaacgacgctcgcaaggccggtcttgtggccctgcaagtcagagtaccttgggtctgaaggggtcactcaagcgctctgctatctctgcagctaaaacgggtgtcaggttttcagctgctactaaagataatgagcataagcgttcactgaccaagactccagccagaaagtctgcacatgtgaccgtgtctgggggcaccccaaaaggcgaggctgtgcttgggacacacaaattaaagaccatcacggggaattctgctgctgttattaccccattcaagttgacaactgaggcaacgcagactccagtctccaataagaaaccagtgtttgatcttaaagcaagtttgtctcgtcccctcaactatgaaccacacaaaggaaagctaaaaccatgggggcaatctaaagaaaataattatctaaatcaacatgtcaacagaattaacttctacaagaaaacttacaaacaaccccatctccagacaaaggaagagcaacggaagaaacgcgagcaagaacgaaaggagaagaaagcaaaggttttgggaatgcgaaggggcctcattttggctgaagattaa

SEQ ID NO: 1336 - protein, 440 aa, Homo sapien
MIIPSLEELDSLKYSDLQNLAKSLGLRANLRATKLLKALKGYIKHEARKGNENQDESQTSASSCDETEIQISNQEEAERQPLGHVTKTRRRCKTVRVDPDSQQNHSEIKISNPTEFQNHEKQESQDLRATAKVPSPPDEHQEAENAVSSGNRDSKVPSEGKKSLYTDESSKPGKNKRTAITTPNFKKLHEAHFKEMESIDQYIERKKKHFEEHNSMNELKQPINKGGVRTPVPPRGRLSVASTPISQRRSQGRSCGPASQSTLGLKGSLKRSAISAAKTGVRFSAATKDNEHKRSLTKTPARKSAHVTVSGGTPKGEAVLGTHKLKTITGNSAAVITPFKLTTEATQTPVSNKKPVFDLKASLSRPLNYEPHKGKLKPWGQSKENNYLNQHVNRINFYKKTYKQPHLQTKEEQRKKREQERKEKKAKVLGMRRGLILAED

SEQ ID NO: 1337 - DNA, 801 bp, Homo sapien
atacgggccgcgccgggcaagaagatggcgggatcagtggccgacagcgatgccgtggtgaaactagatgatggccatttaaacaactctttgagctctccagttcaagcggacgtgtacttcccacgactgatagttccattttgtgggcacattaaaggtggcatgagaccaggcaagaaggtgttagtgatgggcatcgtagacctcaacccagagagctttgcaatcagcttgacctgtggggactcagaagaccctcctgccgatgtggcaatcgaactcaaagctgtgttcacagatcggcagctactcagaaattcttgtatatctggggagaggggtgaagaacagtcagcaatcccttactttccattcattccagaccagccattcagggtggaaattctttgtgagtacccacgtttccgagtgtttgtggatggacaccaactttttgatttttaccatcgcattcaaacgttatctgcaattgacaccataaagataaatggagacctccagatcaccaagcttggctgatttaaaccacctctatttcaaataggatcacgtgccacaactatctgactgttggtctggaagaagtgtcctagcaagatctggagacttaaaaagaaaacaaaaacaaatggcaagtttcacttaagggtggtttgcccttaagaagaaagctgttgggacaaagacaccgagccattatacccagaataaaataatacatttatgctggattttattcagaccaaactaaaaaaaaaaaaaaaaaaaaaaaaaaaa

SEQ ID NO: 1338 - protein, 172 aa, Homo sapien
MAGSVADSDAVVKLDDGHLNNSLSSPVQADVYFPRLIVPFCGHIKGGMRPGKKVLVMGIVDLNPESFAISLTCGDSEDPPADVAIELKAVFTDRQLLRNSCISGERGEEQSAIPYFPFIPDQPFRVEILCEYPRFRVFVDGHQLFDFYHRIQTLSAIDTIKINGDLQITKLG

SEQ ID NO: 1339 - DNA, 1826 bp, Homo sapien
aggtgtttacctggcactcaggtgagtggtgcgctctggctgttttctgtcggagccgcccgcctcttccttcagcgcgtcccacaaatcccgacggcacggaggggccccaggccaagggcgatgggcccctgagccctgacaccgcttcgccgctgctgcaggtgcccctggccggcagcgccgccgtggtcccggagcgcggcgacatgccggagctggtggtgaccgcgctgctggcgccgtcgcgcctgtcgctgaagctgctgcgcgccttcatgtggagcctggtgttctcggtggcgctggtggccgcggcggtctacggctgcatagcgctcacgcacgtgctgtgccggccccggcgcggctgctgcgggcgccgtcggagcgcgtcccccgcctgcctgagcgacccctcgctgggtgagcacggtttcctgaacctcaagagctcgggcctgcgtctgcactatgtctcggctggacgaggtaacggacccctcatgctgtttctgcacggcttccctgagaactggttctcctggcgttaccagctccgggagttccagagccgcttccatgttgtggctgtggacttgcgaggctatggcccctcggatgcacctcgggatgtggactgctacacaatcgacctgctgctggtggacatcaaagatgtcatcctaggcctgggttactcgaagtgcatccttgtggcccatgactggggtgccctccttgcctggcatttctccatctactacccatccctggtcgagcggatggttgtggtcagtggtgcccccatgtcggtgtaccaagactattccctgcaccacatcagccagttcttccgttcccactacatgttcctgttccagctgccctggctgcccgagaagctgctgtctatgtctgactttcagattctgaagaccaccctcacccaccgcaagacaggcatcccatgcttgacccccagcgagctcgaggccttcctttataacttctcacagcctggtggcctcactgggcccctcaactactaccgaaacctcttcaggaacttccccctggaaccccaggagctgaccacacccacattgctgctgtggggggagaaggacacttacttggagctggggctggtggaagccatcggcagccgctttgtgccgggccgcttggaggcccacatcctgccaggcatagggcattggatcccacagagcaacccccaggagatgcaccagtacatgtgggccttcttgcaagacctgctggactagtggtccttgctggcctgcccaggaggcatggatactcaggaaggaacacacacccattatctgtgtgtgcctgggagtccatacaatgtccatacatgggtgaactcttgaatcgctcataggcatgggactcctggatcccacacaagcgcacccatgggtgcctcgggacacaccaacccctatactcacacacaggcatggatgcatgtgtgtgtaacaaacactttgaccctgggaactgggtatacctctcttccagtggagccagatgccgagaccgagtgtcccacctcctcccttcctggggcctcactctgcgctttgccaaagtcgcttctctgccatagctgcacagaccttaaaccctgaccttcctgtccctgccttcgacctcctgcctgggtcttcagctcagtgctactctgaatacaatactgctgaccacatttggctacttcagcttaaatgtatgttaattgaaatgaaatacaatgaaaatgcagtgctcagtcccaaaaaaaaaaaaaaaaa

SEQ ID NO: 1340 - protein, 360 aa, Homo sapien
MPELVVTALLAPSRLSLKLLRAFMWSLVFSVALVAAAVYGCIALTHVLCRPRRGCCGRRRSASPACLSDPSLGEHGFLNLKSSGLRLHYVSAGRGNGPLMLFLHGFPENWFSWRYQLREFQSRFHVVAVDLRGYGPSDAPRDVDCYTIDLLLVDIKDVILGLGYSKCILVAHDWGALLAWHFSIYYPSLVERMVVVSGAPMSVYQDYSLHHISQFFRSHYMFLFQLPWLPEKLLSMSDFQILKTTLTHRKTGIPCLTPSELEAFLYNFSQPGGLTGPLNYYRNLFRNFPLEPQELTTPTLLLWGEKDTYLELGLVEAIGSRFVPGRLEAHILPGIGHWIPQSNPQEMHQYMWAFLQDLLD

SEQ ID NO: 1341 - DNA, 4485 bp, Homo sapien
gtagacagatccaggctcaccagtcctgtgccactgggcttttggcgttctgcacaaggcctacccgcagatgccatgcctgctcccccagcctaatgggctttgatgggggaagagggtggttcagcctctcacgatgaggaggaaagagcaagtgtcctcctcggacattctccgggttgtgaaatgtgctcgcaggaggcttttcaggcacagaggagccagctggtcgagctgctggtctcagggtccctggaaggcttcgagagtgtcctggactggctgctgtcctgggaggtcctctcctgggaggactacgagggcttccacctcctgggccagcctctctcccacttggccaggcgccttctggacaccgtctggaataagggtacttgggcctgtcagaagctcatcgcggctgcccaagaagcccaggccgacagccagtcccccaagctgcatggctgctgggacccccactcgctccacccagcccgagacctgcagagtcaccggccagccattgtcaggaggctccacagccatgtggagaacatgctggacctggcatgggagcggggtttcgtcagccagtatgaatgtgatgaaatcaggttgccgatcttcacaccgtcccagagggcaagaaggctgcttgatcttgccacggtgaaagcgaatggattggctgccttccttctacaacatgttcaggaattaccagtcccattggccctgcctttggaagctgccacatgcaagaagtatatggccaagctgaggaccacggtgtctgctcagtctcgcttcctcagtacctatgatggagcagagacgctctgcctggaggacatatacacagagaatgtcctggaggtctgggcagatgtgggcatggctggacccccgcagaagagcccagccaccctgggcctggaggagctcttcagcacccctggccacctcaatgacgatgcggacactgtgctggtggtgggtgaggcgggcagtggcaagagcacgctcctgcagcggctgcacttgctgtgggctgcagggcaagacttccaggaatttctctttgtcttcccattcagctgccggcagctgcagtgcatggccaaaccactctctgtgcggactctactctttgagcactgctgttggcctgatgttggtcaagaagacatcttccagttactccttgaccaccctgaccgtgtcctgttaacctttgatggctttgacgagttcaagttcaggttcacggatcgtgaacgccactgctccccgaccgaccccacctctgtccagaccctgctcttcaaccttctgcagggcaacctgctgaagaatgcccgcaaggtggtgaccagccgtccggccgctgtgtcggcgttcctcaggaagtacatccgcaccgagttcaacctcaagggcttctctgaacagggcatcgagctgtacctgaggaagcgccatcatgagcccggggtggcggaccgcctcatccgcctgctccaagagacctcagccctgcacggtttgtgccacctgcctgtcttctcatggatggtgtccaaatgccaccaggaactgttgctgcaggagggggggtccccaaagaccactacagatatgtacctgctgattctgcagcattttctgctgcatgccacccccccagactcagcttcccaaggtctgggacccagtcttcttcggggccgcctccccaccctcctgcacctgggcagactggctctgtggggcctgggcatgtgctgctacgtgttctcagcccagcagctccaggcagcacaggtcagccctgatgacatttctcttggcttcctggtgcgtgccaaaggtgtcgtgccagggagtacggcgcccctggaattccttcacatcactttccagtgcttctttgccgcgttctacctggcactcagtgctgatgtgccaccagctttgctcagacacctcttcaattgtggcaggccaggcaactcaccaatggccaggctcctgcccacgatgtgcatccaggcctcggagggaaaggacagcagcgtggcagctttgctgcagaaggccgagccgcacaaccttcagatcacagcagccttcctggcagggctgttgtcccgggagcactggggcctgctggctgagtgccagacatctgagaaggccctgctccggcgccaggcctgtgcccgctggtgtctggcccgcagcctccgcaagcacttccactccatcccgccagctgcaccgggtgaggccaagagcgtgcatgccatgcccgggttcatctggctcatccggagcctgtacgagatgcaggaggagcggctggctcggaaggctgcacgtggcctgaatgttgggcacctcaagttgacattttgcagtgtgggccccactgagtgtgctgccctggcctttgtgctgcagcacctccggcggcccgtggccctgcagctggactacaactctgtgggtgacattggcgtggagcagctgctgccttgccttggtgtctgcaaggctctgtatttgcgcgataacaatatctcagaccgaggcatctgcaagctcattgaatgtgctcttcactgcgagcaattgcagaagttagctctattcaacaacaaattgactgacggctgtgcacactccatggctaagctccttgcatgcaggcagaacttcttggcattgaggctggggaataactacatcactgccgcgggagcccaagtgctggccgaggggctccgaggcaacacctccttgcagttcctgggattctggggcaacagagtgggtgacgagggggcccaggccctggctgaagccttgggtgatcaccagagcttgaggtggctcagcctggtggggaacaacattggcagtgtgggtgcccaagccttggcactgatgctggcaaagaacgtcatgctagaagaactctgcctggaggagaaccatctccaggatgaaggtgtatgttctctcgcagaaggactgaagaaaaattcaagtttgaaaatcctgaagttgtccaataactgcatcacctacctaggggcagaagccctcctgcaggcccttgaaaggaatgacaccatcctggaagtctggctccgagggaacactttctctctagaggaggttgacaagctcggctgcagggacaccagactcttgctttgaagtctccgggaggatgttcgtctcagtttgtttgtgagcaggctgtgagtttgggccccagaggctgggtgacatgtgttggcagcctcttcaaaatgagccctgtcctgcctaaggctgaacttgttttctgggaacaccataggtcacctttattctggcagaggagggagcatcagtgccctccaggatagacttttcccaagcctacttttgccattgacttcttcccaagattcaatcccaggatgtacaaggacagcccctcctccatagtatgggactggcctctgctgatcctcccaggcttccgtgtgggtcagtggggcccatggatgtgcttgttaactgagtgccttttggtggagaggcccggcctctcacaaaagaccccttaccactgctctgatgaagaggagtacacagaacacataattcaggaagcagctttccccatgtctcgactcatccatccaggccattccccgtctctggttcctcccctcctcctggactcctgcacacgctccttcctctgaggctgaaattcagaatattagtgacctcagctttgatatttcacttacagcacccccaaccctggcacccagggtgggaagggctacaccttagcctgccctcctttccggtgtttaagacatttttggaaggggacacgtgacagccgtttgttccccaagacattctaggtttgcaagaaaaatatgaccacactccagctgggatcacatgtggacttttatttccagtgaaatcagttactcttcagttaagcctttggaaacagctcgactttaaaaagctccaaatgcagctttaaaaaattaatctgggccagaatttcaaacggcctcactaggcttctggttgatgcctgtgaactgaactctgacaacagacttctgaaatagacccacaagaggcagttccatttcatttgtgccagaatgctttaggatgtacagttatggattgaaagtttacaggaaaaaaaattaggccgttccttcaaagcaaatgtcttcctggattattcaaaatgatgtatgttgaagcctttgtaaattgtcagatgctgtgcaaatgttattattttaaacattatgatgtgtgaaaactggttaatatttataggtcactttgttttactgtcttaagtttatactcttatagacaacatggccgtgaactttatgctgtaaataatcagaggggaataaactgttgagtcaaaac

SEQ ID NO: 1342 - protein, 1040 aa, Homo sapien
MGEEGGSASHDEEERASVLLGHSPGCEMCSQEAFQAQRSQLVELLVSGSLEGFESVLDWLLSWEVLSWEDYEGFHLLGQPLSHLARRLLDTVWNKGTWACQKLIAAAQEAQADSQSPKLHGCWDPHSLHPARDLQSHRPAIVRRLHSHVENMLDLAWERGFVSQYECDEIRLPIFTPSQRARRLLDLATVKANGLAAFLLQHVQELPVPLALPLEAATCKKYMAKLRTTVSAQSRFLSTYDGAETLCLEDIYTENVLEVWADVGMAGPPQKSPATLGLEELFSTPGHLNDDADTVLVVGEAGSGKSTLLQRLHLLWAAGQDFQEFLFVFPFSCRQLQCMAKPLSVRTLLFEHCCWPDVGQEDIFQLLLDHPDRVLLTFDGFDEFKFRFTDRERHCSPTDPTSVQTLLFNLLQGNLLKNARKVVTSRPAAVSAFLRKYIRTEFNLKGFSEQGIELYLRKRHHEPGVADRLIRLLQETSALHGLCHLPVFSWMVSKCHQELLLQEGGSPKTTTDMYLLILQHFLLHATPPDSASQGLGPSLLRGRLPTLLHLGRLALWGLGMCCYVFSAQQLQAAQVSPDDISLGFLVRAKGVVPGSTAPLEFLHITFQCFFAAFYLALSADVPPALLRHLFNCGRPGNSPMARLLPTMCIQASEGKDSSVAALLQKAEPHNLQITAAFLAGLLSREHWGLLAECQTSEKALLRRQACARWCLARSLRKHFHSIPPAAPGEAKSVHAMPGFIWLIRSLYEMQEERLARKAARGLNVGHLKLTFCSVGPTECAALAFVLQHLRRPVALQLDYNSVGDIGVEQLLPCLGVCKALYLRDNNISDRGICKLIECALHCEQLQKLALFNNKLTDGCAHSMAKLLACRQNFLALRLGNNYITAAGAQVLAEGLRGNTSLQFLGFWGNRVGDEGAQALAEALGDHQSLRWLSLVGNNIGSVGAQALALMLAKNVMLEELCLEENHLQDEGVCSLAEGLKKNSSLKILKLSNNCITYLGAEALLQALERNDTILEVWLRGNTFSLEEVDKLGCRDTRLLL

SEQ ID NO: 1343 - DNA, 1754 bp, Homo sapien
ggaaggtgcgtccgagccatggccgctgccaacccgtgggacccggcgtccgcgcctaacggcgctgggctagtgctaggccacttcatagcttcggggatggtcaatcaggagatgttaaacatgtctaagaaaacagtttcttgttttgtgaacttcaccagactacagcagatcacaaatattcaagctgaaatctaccagaaaaacctggaaattgaactcctgaaactagaaaaagatacagcagatgttgttcatcctttctttttggctcagaagtgtcatactctgcaaagcatgaataatcatttggaagcagtgctgaaagagaagagatcccttaggcaaagactgttgaaacccatgtgccaggaaaacttacctattgaagctgtttatcacagatatatggtacatttgctggagttggctgtgactttcattgagagattagaaacccaccttgaaacaattagaaatattcctcatttagctgcaaatctaaagaaaatgaaccaggctttagcaaagatggatatattggtgactgagacagaagaactggcagagaatatactcaagtggcgtaaacaacaaaacgaagtttcgtcttgtatccccaaaatattagctgaagaaagttatctttataaacatgatattataatgcctcctttaccttttacttctaaagttcatgtccaaactattaatgccaagtagtcatcaactttatttttgcttaattatgtgtagtcatatgaagtctatttctagttgactgtaacatgggtattaatagtctttgctgctggtaatactgaaagaacctgctttatattggagtatcaagatctcaggttcattaagaccaaactgacttttcctttgtttttcatatatttttattctacctttcagtaaaactagagaagctaaaaaagagccatgacaatttattaatataagtgaattaaccatttctcaggtgggaaattctctttttttaaaaatgtgtgtttatcgtctggtgtggtggctcacacctgtaatcctaacacttggggaggctgaggcgggcagatcacttaaacccaggagttcaagaccagcctgggtaacatggtgaaatcccatatctacaaaataaacaaaaaattagccgaccatggtggtgcatgcctgtagtcccagctattcgggaggctgaggtaagaggatcacctaagcctgtgaggtcatggttgcaatgagtcatgatcacgccactgcgctacagcctgggcgacacagtaagaccctgtctcaaaaaaaagaagtgtgtttctggccaggcacggtggctcacgcctgtaatcccagcactttgggaggcctaggtgggcagatcatgaggtcaggagttcgagaccagcctggccaacatggcgaaacacctgtctctactaaaaatacaaaaattaggccgggcgcagtggctcacacctgtaatcccaacactttgggaggccgacccagatgggtggatcacctgaggtcaggagtttgagaccagccttgacaacatggtgaaaccccatctctggtagaaatataaaaaattaaccgggcatggtggtggacgcctgtaatcccagctacttgggaggctgaggcagaataatcgcttgaacccaggaggcagaggttgcagtaagccaagatcgtgcctctgcactccaacctgggtgatggagcaagactccatctcc

SEQ ID NO: 1344 - protein, 235 aa, Homo sapien
MAAANPWDPASAPNGAGLVLGHFIASGMVNQEMLNMSKKTVSCFVNFTRLQQITNIQAEIYQKNLEIELLKLEKDTADVVHPFFLAQKCHTLQSMNNHLEAVLKEKRSLRQRLLKPMCQENLPIEAVYHRYMVHLLELAVTFIERLETHLETIRNIPHLAANLKKMNQALAKMDILVTETEELAENILKWRKQQNEVSSCIPKILAEESYLYKHDIIMPPLPFTSKVHVQTINAK

SEQ ID NO: 1345 - DNA, 2462 bp, Homo sapien
gctgagctgcaggcgcggcgaaacttccctctacccgcccggcccgcggcgcgcaccgttggcgctggacgcttcctccttggaagcgccctctccctcagtcatggagaaaacttgtatagatgcacttcctcttactatgaattcttcagaaaagcaagagactgtatgtatttttggaactggtgattttggaagatcactgggattgaaaatgctccagtgtggttattctgttgtttttggaagtcgaaacccccagaagaccaccctactgcccagtggtgcagaagtcttgagctattcagaagcagccaagaagtctgacatcataatcatagcaatccacagagagcattatgattttctcacagaattaactgaggttctcaatggaaaaatattggtagacatcagcaacaacctcaaaatcaatcaatatccagaatctaatgcagagtaccttgctcatttggtgccaggagcccacgtggtaaaagcatttaacaccatctcagcctgggctctccagtcaggagcactggatgcaagtcggcaggtgtttgtgtgtggaaatgacagcaaagccaagcaaagagtgatggatattgttcgtaatcttggacttactccaatggatcaaggatcactcatggcagccaaagaaattgaaaagtaccccctgcagctatttccaatgtggaggttccccttctatttgtctgctgtgctgtgtgtcttcttgtttttctattgtgttataagagacgtaatctacccttatgtttatgaaaagaaagataatacatttcgtatggctatttccattccaaatcgtatctttccaataacagcaccttacactgcttgctttggtttacctccctggtgttattgctgccattctacaactgtaccgaggcacaaaataccgtcgattcccagactggcttgaccactggatgctttgccgaaagcagcttggcttggtagctctgggatttgccttccttcatgtcctctacacacttgtgattcctattcgatattatgtacgatggagattgggaaacttaaccgttacccaggcaatactcaagaaggagaatccatttagcacctcctcagcctggctcagtgattcatatgtggctttgggaatacttgggttttttctgtttgtactcttggggaatcacttctttgccatctgttagcaatgcagtcaactggagagagttccgatttgtccagtccaaactgggttatttgaccctgatcttgtgtacagcccacaccctggtgtacggtgggaagagattcctcagcccttcaaatctcagatggtatcttcctgcagcctacgtgttagggcttatcattccttgcactgtgctggtgatcaagtttgtcctaatcatgccatgtgtagacaacacccttacaaggatccgccagggctgggaaaggaactcaaaacactagaaaaagcattgaatggaaaatcaatatttaaaacaaagttcaatttagctggatttctgaactatggttttgaatgtttaaagaagaatgatgggtacagttaggaaagtttttttcttacaccgtgactgagggaaacattgcttgtctttgagaaattgactgacatactggaagagaacaccattttatctcaggttagtgaagaatcagtgcaggtccctgactcttattttcccagaggccatggagctgagattgagactagccttgtggtttcacactaaagagtttccttgttatgggcaacatgcatgacctaatgtcttgcaaaatccaatagaagtattgcagcttccttctctggctcaagggctgagttaagtgaaaggaaaaacagcacaatggtgaccactgataaaggctttattaggtatatctgaggaagtgggtcacatgaaatgtaaaaagggaatgaggtttttgttgttttttggaagtaaaggcaaacataaatattaccatgatgaattctagtgaaatgaccccttgactttgcttttcttaatacagatatttactgagaggaactatttttataacacaagaaaaatttacaattgattaaaagtatccatgtcttggatacatacgtatctatagagctggcatgtaattcttcctctataaagaataggtataggaaagactgaataaaaatggagggatatccccttggatttcacttgcattgtgcaataagcaaagaagggttgataaaagttcttgatcaaaaagttcaaagaaaccagaattttagacagcaagctaaataaatattgtaaaattgcactatattaggttaagtattatttaggtattataatatgctttgtaaattttatattccaaatattgctcaatatttttcatctattaaattaatttctagtgtaaaaaaaaaaaaaaaaaaaaaa

SEQ ID NO: 1346 - protein, 283 aa, Homo sapien
MEKTCIDALPLTMNSSEKQETVCIFGTGDFGRSLGLKMLQCGYSVVFGSRNPQKTTLLPSGAEVLSYSEAAKKSDIIIIAIHREHYDFLTELTEVLNGKILVDISNNLKINQYPESNAEYLAHLVPGAHVVKAFNTISAWALQSGALDASRQVFVCGNDSKAKQRVMDIVRNLGLTPMDQGSLMAAKEIEKYPLQLFPMWRFPFYLSAVLCVFLFFYCVIRDVIYPYVYEKKDNTFRMAISIPNRIFPITAPYTACFGLPPWCYCCHSTTVPRHKIPSIPRLA

SEQ ID NO: 1347 - DNA, 2943 bp, Homo sapien
gtgctgcctggcgctggctaggaggcaaacgcacgcgggaagagctgctacccattccagggaccctgccgctgcccctctgaggggtctgcacctcctgggagcaggtgggtctctgggacgagggtccatggtggatggctctggagacgctcccgaggctgtgccgtcccgctgctgcacaggtcggagggtcaccgcagaggctactcgggctggggctggggccgagggagcccgcactggagccccatgtggaacccaaggatgcagctgctctgctaacacggcagcccatccttcgagactgtgacctcgccacagtggccctcagccctccacctccggcgggggcgagggccacccacctccaagtctccagccatgacgacctccgcactccggcgccaggtgaagaacatcgtgcacaactactccgaggcagaaatcaaggtgcgcgaggccaccagcaatgacccctggggcccccctagttcgctcatgtccgagatcgctgacctgaccttcaacacagtggccttcaccgaagtcatgggcatgctgtggcggcggctcaatgacagcggcaagaactggcggcacgtgtacaaggctctaacattgctggactacctgctcaagacgggctccgagcgggtggcccaccagtgccgcgagaacctctacaccatccagacactcaaggacttccagtacatcgaccgcgacggcaaggaccagggcgtcaacgtgcgcgagaaggtcaagcaggtgatggccctgctcaaggatgaggagcggctgcggcaggagcgaacccacgccctcaagaccaaggagcgcatggcactggagggcatcggcattggcagtgggcagctgggcttcagccgccgctacggcgaggactacagccgctcccggggctccccgtcctcctacaactcctcctcttcgtcaccccgctatacctccgacctggagcaggcccggcctcagacgtcaggggaagaggaactgcagctgcagctggccctcgccatgagccgtgaggaggcagagaagcctgtccccccagcctcccacagggacgaggacctgcagctgcagctggctctgcgcctgagccggcaggagcacgagaaggaggtgaggtcctggcagggtgatggctcccccatggccaatggtgcaggggccgtggtccaccatcagcgggacagagagcctgagagagaggagagaaaggaggaggagaagctaaaaaccagccagtcctccatcctggacttggctgacatcttcgtacctgccctggccccgccctccacacactgctctgctgacccatgggacatcccaggttttaggccgaacacagaggccagtggatcctcctgggggccttctgcagacccctggtctccgatcccctcaggaaccgtcctgtcccgaagccagccctgggatctgactcccatgctctcctcctctgagccctggggcaggaccccagtgctgcctgctgggccccccaccacagacccctgggccctgaactctccccactacaaactccccagcactggggctgacccttggggagcctccctggagacctccgacacacctggtggtgcctcgacctttgacccatttgccaaacctccagaatccacagagaccaaggaggggctggagcaggccctgccctctgggaagcccagcagccctgtggagctggacctgtttggagaccccagccccagttccaagcaaaatggcacgaaggagccagatgccctggacctgggcatactaggggaagcactaacccagccaagcaaagaggcccgagcttgccggactcccgagtccttcctgggtccctcagcttcctccttggtcaaccttgactcgttggtcaaggcaccccaggttgcaaagacccggaaccccttcctgacaggtctcagcgctccgtcccccaccaacccgttcggcgcgggcgagacgggcaggccgacgctaaaccagatgcgcaccggctcgccggcgctgggcctggcaggcgggcctgtgggggcgcccctgggctccatgacctacagcgcctctctgcccctcccgctcagcagcgtgccagctggcttgaccctccccgcctcggttagcgtcttcccgcaggccggagccttcgcaccgcagccgctgctgcccacgccgagctcagccgggccgcggcccccgcccccgcagaccggcaccaaccccttcctctgagccccgccccgtcccataccggcctgcgcctgcgccggacgctccgcggccccgcctccggacccggggctgggcggggcgccggtgctagtggaacgccgtgccagtggcggctggtatcccgcggcggctctggaagctggacgcggaccacggcccgggagctagaaactgaacgcccgcataataaagactggaacccacgttctcagctctcaccaagtggactttttgcggggtgtggcggccgggtctcgaccacagcgtggatcaccggctgtttaggaaactgcagctgcacaacgtggggtgcaaaactgccccgcttcctttacagctcttctcaaccctcacctccatcccccgtcacccaggcaccttcgcttccagatgctgccaggctgtcactcaattcggtcatttcattcatttatcacacatgggcactggggttgggctaacagcaagagacaataggcctttgttcctatttattgggtactgcttacgtgctaagcagatcagtttatttaatgcttgcaacgactctctgaggtagaaaatattgttaattccgttcaggatcccggctacataatctgtggggctcaatacaaaataaaaatgtaggggctccttgttcaaaaaaaaaaaaaaaaa

SEQ ID NO: 1348 - protein, 632 aa, Homo sapien
MTTSALRRQVKNIVHNYSEAEIKVREATSNDPWGPPSSLMSEIADLTFNTVAFTEVMGMLWRRLNDSGKNWRHVYKALTLLDYLLKTGSERVAHQCRENLYTIQTLKDFQYIDRDGKDQGVNVREKVKQVMALLKDEERLRQERTHALKTKERMALEGIGIGSGQLGFSRRYGEDYSRSRGSPSSYNSSSSSPRYTSDLEQARPQTSGEEELQLQLALAMSREEAEKPVPPASHRDEDLQLQLALRLSRQEHEKEVRSWQGDGSPMANGAGAVVHHQRDREPEREERKEEEKLKTSQSSILDLADIFVPALAPPSTHCSADPWDIPGFRPNTEASGSSWGPSADPWSPIPSGTVLSRSQPWDLTPMLSSSEPWGRTPVLPAGPPTTDPWALNSPHYKLPSTGADPWGASLETSDTPGGASTFDPFAKPPESTETKEGLEQALPSGKPSSPVELDLFGDPSPSSKQNGTKEPDALDLGILGEALTQPSKEARACRTPESFLGPSASSLVNLDSLVKAPQVAKTRNPFLTGLSAPSPTNPFGAGETGRPTLNQMRTGSPALGLAGGPVGAPLGSMTYSASLPLPLSSVPAGLTLPASVSVFPQAGAFAPQPLLPTPSSAGPRPPPPQTGTNPFL

SEQ ID NO: 1349 - DNA, 1183 bp, Homo sapien
ggcacgagccacgattcagtcccctggactgtagataaagaccctttcttgccaggtgctgagacaaccacactatgagaggcactccaggagacgctgatggtggaggaagggccgtctatcaatcaatgtgtaaacctattactgggactattaatgatttgaatcagcaagtgtggacccttcagggtcagaaccttgtggcagttccacgaagtgacagtgtgaccccagtcactgttgctgttatcacatgcaagtatccagaggctcttgagcaaggcagaggggatcccatttatttgggaatccagaatccagaaatgtgtttgtattgtgagaaggttggagaacagcccacattgcagctaaaagagcagaagatcatggatctgtatggccaacccgagcccgtgaaacccttccttttctaccgtgccaagactggtaggacctccacccttgagtctgtggccttcccggactggttcattgcctcctccaagagagaccagcccatcattctgacttcagaacttgggaagtcatacaacactgcctttgaattaaatataaatgactgaactcagcctagaggtggcagcttggtctttgtcttaaagtttctggttcccaatgtgttttcgtctacattttcttagtgtcattttcacgctggtgctgagacaggggcaaggctgctgttatcatctcattttataatgaagaagaagcaattacttcatagcaactgaagaacaggatgtggcctcagaagcaggagagctgggtggtataaggctgtcctctcaagctggtgctgtgtaggccacaaggcatctgcatgagtgactttaagactcaaagaccaaacactgagctttcttctaggggtgggtatgaagatgcttcagagctcatgcgcgttacccacgatggcatgactagcacagagctgatctctgtttctgttttgctttattccctcttgggatgatatcatccagtctttatatgttgccaatatacctcattgtgtgtaatagaaccttcttagcattaagaccttgtaaacaaaaataattcttgtgttaagttaaatcatttttgtcctaattgtaatgtgtaatcttaaagttaaataaactttgtgtatttatataataaaaaaaaaaaaaaaaaa

SEQ ID NO: 1350 - protein, 169 aa, Homo sapien
MRGTPGDADGGGRAVYQSMCKPITGTINDLNQQVWTLQGQNLVAVPRSDSVTPVTVAVITCKYPEALEQGRGDPIYLGIQNPEMCLYCEKVGEQPTLQLKEQKIMDLYGQPEPVKPFLFYRAKTGRTSTLESVAFPDWFIASSKRDQPIILTSELGKSYNTAFELNIND

SEQ ID NO: 1351 - DNA, 2216 bp, Homo sapien
ggaagctcagcagtgtccactgtcgccattccttggccatagaaaacaatgtatttgaattttgatgtaagcatagcaaattgaagatgaagatgacacgttgatttcttgtttgaaattaaccaagtcccgagaaaagaaagtgaatagtgttagcacgaggaggaaggaagaaatggagattagattggatactctttctgcatcactgggtagatccagcactttaaatgactgcaacttggaagataaattagcttggtatgaaggtgaagcttacatgtggcatcactggaagccttttcctgaaaaccctctctggacatgtcttgatttccaaatagcacaagttggaccctgggactactgctcctcttgtattcgccacacacgtctcaagtcttcctgctcagatatggatctcctacattcatggcgaagcagcagttttgggaatttcgatcgttttcggaataattctttatcaaaaccagatgattcaactgaggcacatgaaggagatcccacaaatggaagtggagaacaaagtaaaacttcaaataatggaggcggtttgggtaaaaaaatgagagctatttcatggacaatgaagaaaaaagtgggtaaaaagtacatcaaagccctttctgaggaaaaggatgaggaagatggagagaatgcccacccatatagaaacagtgaccctgtgattgggacccacacagagaaggtgtccctcaaagccagtgactccatggatagtctctacagtggacagagctcatcaagtggcataacaagctgttcagatggtacaagtaaccgggacagctttcgactggatgacgatggcccctattcaggaccattctgtggccgtgccagagtgcatacggatttcacgccaagtccctatgacactgactccctcaaaatcaagaaaggagacatcatagacattatttgcaaaacaccaatggggatgtggacaggaatgttgaacaataaagtgggaaacttcaaattcatttatgtggatgtcatctcagaagaggaagcagcccccaagaaaataaaggcaaaccgaaggagtaacagcaaaaaatccaagactctgcaggagttcctagagaggattcatctgcaggaatacacctcaacacttttgctcaatggttatgagactctagaagatttaaaagatataaaagagagtcacctcattgaattaaatattgaaaacccagatgacagaagaaggttactatcagctgctgaaaacttccttgaagaagaaattattcaagagcaagaaaatgaacctgagcccctatccttgagctcagacatctccttaaataagtcacagttagatgactgcccaagggactctggttgctatatctcatcaggaaattcagataatggcaaagaggatctggagtctgaaaatctgtctgacatggtacataagattattatcacagagccaagtgactgaacacgcattcccaactatatatctacagatgcattccattttaactcttcttgagctaaaacgtcaaataggagaggaagataagataaatatttgtaaataaaacctaaagtttaaatgttttaatctgaataattgtacataaaattttgtatctctaacattccaaattactgtcaataaaatatatatttattattttaaatgctatgtgttaatatttcacttgcttgtattagaaaggcaaaatgtaagactttggtatgtgtgacatatgctttatttggctttattttacaagtacagtatctgcaaaaaacaaagtaaccttttttcatacctgccagttttgaatttatatatgttattgaacaaatagtaatagaggattcgctgttgaaacaagttgtccaagcaatgttatattcatttttatacttattgggaaagtgtgagttaatattggacacattttatcctgatccacagtggagttttagtaattatattttgttgatttcttcattttgttttctggtataaaagtagagataatgtgtagtcacttctgatttagtgaaaccaattgtaataattgtggaaatgttttgtctttaagtgtaaatattttaaaatttgacataccctaatgttaataataaaaagaactatttgcataaaaaaaaaaaaaaaaaaaaaaaaaaaaaaaaaaaaa

SEQ ID NO: 1352 - protein, 441 aa, Homo sapien
MEIRLDTLSASLGRSSTLNDCNLEDKLAWYEGEAYMWHHWKPFPENPLWTCLDFQIAQVGPWDYCSSCIRHTRLKSSCSDMDLLHSWRSSSFGNFDRFRNNSLSKPDDSTEAHEGDPTNGSGEQSKTSNNGGGLGKKMRAISWTMKKKVGKKYIKALSEEKDEEDGENAHPYRNSDPVIGTHTEKVSLKASDSMDSLYSGQSSSSGITSCSDGTSNRDSFRLDDDGPYSGPFCGRARVHTDFTPSPYDTDSLKIKKGDIIDIICKTPMGMWTGMLNNKVGNFKFIYVDVISEEEAAPKKIKANRRSNSKKSKTLQEFLERIHLQEYTSTLLLNGYETLEDLKDIKESHLIELNIENPDDRRRLLSAAENFLEEEIIQEQENEPEPLSLSSDISLNKSQLDDCPRDSGCYISSGNSDNGKEDLESENLSDMVHKIIITEPSD

SEQ ID NO: 1353 - DNA, 1999 bp, Homo sapien
ggcagccagaagcacctgtgctcccaggataagggtgagcactcaggatgactgtggagaaggaggcccctgatgcgcacttcactgtggacaaacagaacatctccctctggccccgagagcctcctcccaagtccggtccatctctggtcccggggaaaacacccacagtccgtgctgcattaatctgcctgacgctggtcctggtcgcctccgtcctgctgcaggccgtcctttatccccggtttatgggcaccatatcagatgtaaagaccaatgtccagttgctgaaaggtcgtgtggacaacatcagcaccctggattctgaaattaaaaagaatagtgacggcatggaggcagctggcgttcagatccagatggtgaatgagagcctgggttatgtgcgttctcagttcctgaagttaaaaaccagtgtggagaaggccaacgcacagatccagatcttaacaagaagttgggaagaagtcagtaccttaaatgcccaaatcccagagttaaaaagtgatttggagaaagccagtgctttaaatacaaagatccgggcactccagggcagcttggagaatatgagcaagttgctcaaacgacaaaatgatattctacaggtggtttctcaaggctggaagtacttcaaggggaacttctattacttttctctcattccaaagacctggtatagtgccgagcagttctgtgtgtccaggaattcacacctgacctcggtgacctcagagagtgagcaggagtttctgtataaaacagcggggggactcatctactggattggcctgactaaagcagggatggaaggggactggtcctgggtggatgacacgccattcaacaaggtccaaagtgcgaggttctggattccaggtgagcccaacaatgctgggaacaatgaacactgtggcaatataaaggctccctcacttcaggcctggaatgatgccccatgtgacaaaacgtttcttttcatttgtaagcgaccctatgtcccatcagaaccgtgacaggacaggctcccaagctcactctttgagctccaacgcttgttaaacatgaggaaatgcctctttcttccccagactccaggatgactttgcacgttaatttttcttgcttcaaaattgtcccacagtggcattctggagtccgtctgtcttggctggaaattctctgacgtcttggaggcagctggaatggaaaggagaattcaggttaaagtgggaggggtgggtagagaggatttagaagttccaattgccctgctaaggaggatcaagacccgtaatccggcacaacaccctggggttttccactctttcagagaaacctcagcttcatcacatcaaagttactccagagcaaccaagcaattctcctgatattgtcatccagggcttttcttggccaaaccccctagaatttccatgtctctgcttagctgtgctggcagctagcagctggctgtgtttgcagtgcaaatagctctgttcttggaaatcctgctcatggtatgtccccagtggtttcttcatccacatcatctaaagcctgaacccgttcttctctggttcaagtcagtggctgacacggacttgtatctccttcagagctcggctggcacccagcctcccttctccttccactcccttagtacactggagtgccgagccctgccttccacccagcgtccatccagcccctgtcctcacctctccggcacctcctcctccttctgcatttcctatcttcctgtgtcttgtgcatgggaagcagccttcagtgccttcatgaattcaccttccagcttcctcagaataaaatgctgcctgggtcaaggaaaaaaaaaaaaaaaaaaaaaaaaaaaaaaaaaaaaaaaaaaaaaaaaaaaaaaaaaaaaaaaaaaaaaaaaaaaaaaaaaaaaaaaaaaaaaaaaaaaaaaaaaaaaaaaaaaaaaaaaaaaaaaaaaaaa

SEQ ID NO: 1354 - protein, 328 aa, Homo sapien
MTVEKEAPDAHFTVDKQNISLWPREPPPKSGPSLVPGKTPTVRAALICLTLVLVASVLLQAVLYPRFMGTISDVKTNVQLLKGRVDNISTLDSEIKKNSDGMEAAGVQIQMVNESLGYVRSQFLKLKTSVEKANAQIQILTRSWEEVSTLNAQIPELKSDLEKASALNTKIRALQGSLENMSKLLKRQNDILQVVSQGWKYFKGNFYYFSLIPKTWYSAEQFCVSRNSHLTSVTSESEQEFLYKTAGGLIYWIGLTKAGMEGDWSWVDDTPFNKVQSARFWIPGEPNNAGNNEHCGNIKAPSLQAWNDAPCDKTFLFICKRPYVPSEP

SEQ ID NO: 1355 - DNA, 2114 bp, Homo sapien
actgtttcacacttttctgcttctggaaggtgctggacaaaaacatggaactaatttccccaacagtgattataatcctgggttgccttgctctgttcttactccttcagcggaagaatttgcgtagacccccgtgcatcaagggctggattccttggattggagttggatttgagtttgggaaagcccctctagaatttatagagaaagcaagaatcaagtatggaccaatatttacagtctttgctatgggaaaccgaatgacctttgttactgaagaagaaggaattaatgtgtttctaaaatccaaaaaagtagattttgaactagcagtgcaaaatatcgtttatcgtacagcatcaattccaaagaatgtctttttagcactgcatgaaaaactctatattatgttgaaagggaaaatggggactgtcaatctccatcagtttactgggcaactgactgaagaattacatgaacaactggagaatttaggcactcatgggacaatggacctgaacaacttagtaagacatctcctttatccagtcacagtgaatatgctctttaataaaagtttgttttccacaaacaagaaaaaaatcaaggagttccatcagtattttcaagtttatgatgaagattttgagtatgggtcccagttgccagagtgtcttctaagaaactggtcaaaatccaaaaagtggttcctggaactgtttgagaaaaacattccagatataaaagcatgtaaatctgcaaaagataattccatgacattattgcaagctacgctggatattgtagagacggaaacaagtaaggaaaactcacccaattatgggctcttactgctttgggcttctctgtctaatgctgttcctgttgcattttggacacttgcatacgtcctttctcatcctgatatccacaaggccattatggaaggcatatcttctgtgtttggcaaagcaggcaaagataagattaaagtgtctgaggatgacctggagaaactccttctaattaaatggtgtgttttggaaaccattcgtttaaaagctcctggtgtcattactagaaaagtggtgaagcctgtggaaattttgaattacatcattccttctggtgacttgttgatgttgtctccattttggctgcatagaaatccaaagtattttcctgagcctgaattgttcaaacctgaacgttggaaaaaggcaaatttagagaagcactctttcttggactgcttcatggcatttggaagcgggaagttccagtgtcctgcaaggtggtttgctctgttagaggttcagatgtgtattattttaatactttataaatatgactgtagtcttctggacccattacccaaacagagttatctccatttggtgggtgtcccccagccggaagggcaatgccgaattgaatataaacaaagaatatgacatctgttgggcctcacaaggaccagggccttctggaggagtggcactaccccacctggcagcacctagacctgagctctacaaaaacacactgcttcactttgttttaggacttagttcaagaacacattcaaatggtgcatgtgtttggtatcttcaacagtagaccaagaatctaacatcactctcagtaatatagagaccggaatacatggtttataggaaatgatcaaatgatccaaaaaaactccacattttttaagaagttggaatttgatttcatgcataactgtattaaaacattaaatagaaataatgtcatttgaatgaaaatcttatcacattaaattcactgtgaaggcagcatacttaaaggaatttgatttcatgcataactgtattaaaacattaaatagaaataatgtcatttgaatgaaaatcttatcacattaaattcactgtgaaggcagcatacttaaatttttattttgaaaagtctaaaaggcttagatttttaaaatttaataattatttctacaaattttctatttttcttgaggtgattctcaactagcaattggaactcctaggctctattaacataattctttattgtaaacgtatctaatgctaaaagtaataaaatggtagttttctgag

SEQ ID NO: 1356 - protein, 469 aa, Homo sapien [sequence omitted]

SEQ ID NO: 1357 - DNA, 2587 bp, Homo sapien
aaagttgctagctgggggcagagacggccacgcggttgcaggagtaagagatccctctgtggcgaattggccaacggctcctttcaaccctgcctcgttggtggccactggagaagcgcggggggctcccccagacagccgtggggacaagttagagccagcactttaccccgggccttgcgtgtagcttcccctcccctactctcggtgccctggtgtctggaggggggttgtgggggtgtgcccgccttacatggtccaccacccgggcaaccctctgggcttgtgttccatctcactcttgcttcctgtactgtggtcaaggggaaccactgcatcatgtcccggtatagctaccagagtctcctggactggctctatgggggcgtggaccccagttttgcaggcaatgggggccccgactgtgctgccttcctctcttggcagcagcggctgctggaaagtgtggtggtcctgaccctggctctgttggagatcctggtggccctgcggcacatcctgaggcagacgaaggaggacggtaggggtagccctggcagccagccagagcaggtgacccagcggccagaggaaggcaaggagagcctgagcaagaatctgctcttagtagccctgtgcctgaccttcggggtggaggtgggctttaagttcgccaccaagaccgtcatctacctgctcaacccctgtcacctggtcaccatgatgcatctcccctttgaattggagatttactacattcagcatgttatgctctacgtggtacccatctacctgctttggaaaggaggtgcttacactccagagcccctcagcagtttccggtgggctcttctctcaactggcctcatgttcttttatcacttcagcgtcttgcagatcctcggcctggtcaccgaagtgaatttgaacaacatgctgtgtccggccatctcagacccattctacggcccctggtatcgcatctgggcctcgggacaccagactctcatgaccatgacccacgggaagctggtcatcctgttctcatacatggctgggcccttgtgtaaatatctgctggatttgctccggcttccagccaagaaaatagactgaaggtgcttatttttttttttttcctccctgaggaagcaagtcgtgacttgacttggagaacacccagttcttgataaaatcatgggagagggcagtaggatgtttggtgtatttctttttcctcctttctgtccctttcttctaccactcttcctttcccagctcttccccctacgatgtctccttgagcctggggtgtagtgctgggcgctggattttcctccttccctttggctctctcctcaaacttcatcgcattcatagaagctgcttgcagggtcgccgggctaaccagggtgatcggcgaactttaccgtacagtacctcagtctagctgtcagatcaccccttttgctgtagcctctgttgaggtttttatatttgtgatcattggtaattcagtgtcctatgaagtgggcacagctccccacagagagcaagttgtcagcaggtctctgtgcactggtattggggcagggcagtgccctgggggtaagctaggtggctcagggagtggcagaagggccatttttccctctgccaaaaagacttccttggatttgtagatgttgacccagagtcctctgtcccctcctgaagaggattttcttactggtttctactgaaggggaggtaggggaggaggaaaaaaggaccatgtgtgatgctgttagacaagacactgacgctgattatggagggtctcctgcaggcccttgtgggctccttggcaaggccccaggctgggaaggagctccccccactgcccatcctgcccgctttgtggcgggtagagtcagtgacagggaggcagccctccttttgtgtatatagagtgagctgatttgggctcaggaaaacctagtcgcttgttgctctcgtctgtgacatttttgtacactggtttgctactcatggcaagaaacagacaaagccccatgaaaaataaaacaaaacaaaagtcatttcaaacaaagctgttgttttgaaaactcttgctttcttttggtgtccattttgtgttctattttaaagaatctttcatttatattggtgttattgtagtgaagagaatgtgataggctgatctgtaatggtttctgtcaggagcttagcaaatgcctctgcccctcttcccctacccctgtccttcctcagttcccagctgggattgctatgcactgggcagacccgtcactgtctcccctgaacccccacacagtggcttcccttagaaccagtctttgtactctccctaaacagcagcaggcttaggatttttgtcaggctggttcttgcgtgctctgtgcccccaccagtttgctcacctcttggggcattttgtaatgtgttttctctgtcttgtaaaaccttttgattgtaccgaaatggtatctgcagtcgcctttggaaataaatggtcattaatttgtgtacttagcattctgaaaaaaaaaaaaaaaaaaaaaaa

SEQ ID NO: 1358 - protein, 153 aa, Homo sapien
MPALYCPSFGTGVREKLELAHPVASGAVFPAPPQGFPVSAKPVPQPGFRVPFASVWELCACVRVFVEEGSFLSNGLRKGKEYSLQPLGSLGQGCGPRTVCGAGQLVASTPNSRDPVTPASGPPCPQYLVLYTKDDLAHLPPRGTTVTCSSVSL

SEQ ID NO: 1359 - DNA, 2943 bp, Homo sapien
gagctcacagacccataatcctgcatttctctaacaagttgtttatggagttgcttctccatttgcctacatcccaaaattcacccctcccggtttcttctgccccctcctgagtcccggcctgaaggagggggagggacgcgggtgcggcgcgggtgggggagggcggacccgacgcacagggccagcgccgaggcgccccctctccgccagcggttgacgcccccggattatttatccgcaaagtcccgcgcgcgcccattgggccgaggcccgagtgtcagcgcgagtcccggctcgccattggctccgcacacgtgcggccctgactcacgtgcttccggtttgaaggcaaaaagtgtgcctgggtgattttttttttaagcgagagagtttgtgcaaagatccgagctgtcagagatttgaaaaaaaaaaaaaaaacaaaaaaaaaaaaaccagcccggcgctggcggagacgcgctctccctgcaaaaaaagcaaaggcgattaaaggcgctgccagcctcacgctctgggcacagctgagcgtgacactcggggaagtcaaacccctcactactgcctaggaagatggctagactttaaatactatttttttccctttaagaaaaaaattattggagctttttttcttgctttctttttccttttctttttctttttttccttcatttttttggccgtggcttactccccatttaaatcaaatcattgaatctggttgcagaaagaaaaaagaaatagccaagtgtctccatatctggatgtctacaaattagagagggagagacagcgagatctatctgctagataagaacgagcgatccaggccagacgcctgagcttttttcctgcacccgccccgtgccttcgctgaggcttcgcctgcctccttcctccgcgcacccccacgggccgctggcaaagtggggtggggagcgaggcggtgggggcgggggccggcgcggcggccggggcggcggggcggccgagcatggaagaacagcagccggaacctaaaagtcagcgcgactcggccctcggcggcgcggcggcggcgactccgggcggcctcagcctgagcctcagtccgggcgccagcggcagcagcggcagcggcagcgatggagacagcgtgccggtgtccccgcagcctgcgcccccctcgccgcccgcggcgccttgcctgccgcccctggcccaccacccgcacctccccccacaccccccgcccccgccgcctcagcatctcgcggcgcctgctcaccagccgcagccagcggcccagctgcaccgcaccaccaactttttcatcgacaacatcctgaggccggacttcggctgcaaaaaggagcagccgccaccgcagcttctggtggctgcggcggccagaggaggcgcaggaggaggaggccgggtcgagcgtgacagaggccagactgccgcaggtagagaccctgtccacccgttgggcacccgggcgccaggcgctgcctcgctcctgtgcgccccggacgcgaactgtggcccacccgacggctcccagccagccgccgccggcgcgggcgcgtctaaagctgggaacccggctgcggcggcggcggcggccgcggcggcagtggcggcggcggcggcggccgcagcagccaagccctcggacaccggtggcggcggcagtggaggcggcgcggggagccccggagcgcagggcaccaaatacccggagcacggcaacccggctatcctacttatgggctcagccaacggcgggcccgtggtcaaaactgactcgcagcagcctctcgtatggcccgcctgggtgtactgcacacgttattcggatcgtccatcctccggtccgcgcaccaggaagctgaagaagaagaagaacgagaaggaggacaagcggccgcggaccgcgttcacggccgagcagctgcagagactcaaggcggagttccaggcaaaccgctacatcacggagcagcggcggcagaccctggcccaggaactcagcctcaacgagtcccagatcaagatctggttccagaacaagcgcgccaagatcaagaaagccacaggcatcaagaacggcctggcgctgcacctcatggcccagggactgtacaaccactccaccaccacggtccaggacaaagacgagagcgagtagccgccacaggccggggccgcgcccgcgccccctcccggcaccgccgccgtcgtctcccggcccctcgctgggggagaaagcatctgctccaaggagggagggagcgcagggaaaagagcgagagagacagaaagagagcctcagaatggacaatgacgttgaaacgcagcatttttgaaaagggagaaagactcggacaggtgctatcgaaaaataagatccattctctattcccagtataagggacgaaactgcgaactccttaaagctctatctagccaaaccgcttacgaccttgtatatatttaatttcaggtaaggaaaacacatacgtgtagcgatctctatttgctggacatttttattaatctcctttattattattgttataattattataattattataattattttatggccctcccccaccgcctcgctgcccccgcccagtttcgttttcgttgcctttttcatttgaatgtcattgcttctccggtgcctcccgacccgcatcgccggccctggtttctctgggacttttctttgtgtgcgagagtgtgtttcctttcgtgtctgcccacctcttctcccccacctcccgggtcccttctgtcggtctgtctgttctgcccccctttcgttttccggagacttgttgagaaatacgaccccacagactgcgagactgaaccgccgctacaagccaaagattttattatgttcagaaacctgtagtctgaaataaa

SEQ ID NO: 1360 - protein, 392 aa, Homo sapien
MEEQQPEPKSQRDSALGGAAAATPGGLSLSLSPGASGSSGSGSDGDSVPVSPQPAPPSPPAAPCLPPLAHHPHLPPHPPPPPPQHLAAPAHQPQPAAQLHRTTNFFIDNILRPDFGCKKEQPPPQLLVAAAARGGAGGGGRVERDRGQTAAGRDPVHPLGTRAPGAASLLCAPDANCGPPDGSQPAAAGAGASKAGNPAAAAAAAAAAVAAAAAAAAAKPSDTGGGGSGGGAGSPGAQGTKYPEHGNPAILLMGSANGGPVVKTDSQQPLVWPAWVYCTRYSDRPSSGPRTRKLKKKKNEKEDKRPRTAFTAEQLQRLKAEFQANRYITEQRRQTLAQELSLNESQIKIWFQNKRAKIKKATGIKNGLALHLMAQGLYNHSTTTVQDKDESE

SEQ ID NO: 1361 - DNA, 2161 bp, Homo sapien
ggcagcggcggagccggggaaggtcggagggagggtggtttcctcccgccccacacccagtctccgagccggatatatagagtgtcacgtttgggagccgaaagactggagccgtttccttgtggctggagcgcttcccgtagcctcggggaaggagcaggatttagaggaccactagttggaccccatcctcgtgctggaggaacaggaacctctttcaggagctataaaagaaagggaggaatcatgtccacaattgcagctttctatggcggcaagtccattctcatcacgggggccacaggctttctgggcaaagtgctgatggagaagctgtttcgcaccagcccagacctgaaagtcatttacatccttgtgaggcccaaggctggccaggcactgcagcagagggttttccagatcctagacagtaagctatttgagaaagtcaaagaagtttgtccaaatgtgcatgagaagatcagagctatttatgcagatctcaatcagaatgactttgccatcagcaaagaggacatgcaggagcttctctcctgtacaaacataatatttcactgtgcagccactgtacgctttgacgacactctcagacatgctgtgcaacttaacgtcactgccacccggcagctcttgcttatggctagtcagatgccaaagctggaagcctttatacatatctctactgcctattcaaattgtaacctgaagcacatcgatgaagttatctatccgtgccctgtggagccaaaaaaaatcattgattcccttgagtggttagacgatgctattattgacgagattacacccaagctgatcagagattggcccaatatttatacctacaccaaggccttgggagaaatggtggtgcagcaagagagcaggaacctgaacattgccatcataaggccctccattgtgggagcaacttggcaggagcctttcccaggttgggttgataatataaatggacctaatggaatcattattgcgactgggaaagggtttcttcgggccataaaagctactccaatggctgtggcagacgtaattccagttgatacagtcgtcaatctcatgctagctgtaggatggtatactgcagttcacagacctaagtcaacattagtctaccacattacatctggtaacatgaatccctgcaattggcacaaaatgggagtccaagtcttggcaacctttgaaaaaatcccatttgagagacctttcaggaggccaaatgctaattttaccagcaacagcttcacatcacagtactggaatgcggtcagccaccgggcccctgccattatctatgactgctatctgcggctcactggaaggaagcccaggatgacaaagctcatgaatcggcttttaagaactgtttccatgttggagtatttcatcaaccggagttgggaatggagcacgtacaatacagaaatgctgatgtctgagctgagtcctgaagaccagagagtattcaactttgacgtgcgccagttgaactggttggaatacattgaaaattatgttttgggagttaaaaaatacttattgaaagaggatatggctgggatcccaaaagcaaagcaacgcttaaaaaggctccgaaatattcactacctctttaatactgccctcttccttatcgcctggcgccttctcattgcaagatctcagatggctcggaatgtctggttcttcattgtaagcttctgttataaattcctctcctactttagagcatccagcacgctcaaagtttaagagcatttagccatcgctttttatctggaacctctcagatacctctaaaacagcaaactgtgattctcaagattagaaagtaacaaggaatatgcccaaactgtcaaatgtcacctgttatgtattcgtccctattccttaactatgtatttttatttcagtgagagaaggaaagttgtaaactagcccatagtcacctatattttagggaaaaaaatccaaattgtttcctaacattctattttatgcccttgcgtattaaacgtgaaagtactcccaaaaaaaaaaaaaaaaaaaaaaaaaaaaaaaaaaaaaaaaaaaaaaaaaaaaaaaaaaaaaaaaaaaaaaaaaaaaaaaaaaaaaaaag

SEQ ID NO: 1362 - protein, 515 aa, Homo sapien
MSTIAAFYGGKSILITGATGFLGKVLMEKLFRTSPDLKVIYILVRPKAGQALQQRVFQILDSKLFEKVKEVCPNVHEKIRAIYADLNQNDFAISKEDMQELLSCTNIIFHCAATVRFDDTLRHAVQLNVTATRQLLLMASQMPKLEAFIHISTAYSNCNLKHIDEVIYPCPVEPKKIIDSLEWLDDAIIDEITPKLIRDWPNIYTYTKALGEMVVQQESRNLNIAIIRPSIVGATWQEPFPGWVDNINGPNGIIIATGKGFLRAIKATPMAVADVIPVDTVVNLMLAVGWYTAVHRPKSTLVYHITSGNMNPCNWHKMGVQVLATFEKIPFERPFRRPNANFTSNSFTSQYWNAVSHRAPAIIYDCYLRLTGRKPRMTKLMNRLLRTVSMLEYFINRSWEWSTYNTEMLMSELSPEDQRVFNFDVRQLNWLEYIENYVLGVKKYLLKEDMAGIPKAKQRLKRLRNIHYLFNTALFLIAWRLLIARSQMARNVWFFIVSFCYKFLSYFRASSTLKV

SEQ ID NO: 1363 - DNA, 699 bp, Homo sapien
gcccattccagttggagaacgtagtgagtctttcagtggagccagggtctggtttgtcgtgaggagctccgcgatgtcctctcaacagagcgccgtttccgccaaaggcttttccaaggggtcgtcccagggccccgctccgtgtcccgccccggcgcccaccccggcgcccgcctcctcctcctcctgctgtggctccggcaggggctgctgcggcgactcaggctgctgcggctccagctccaccagttgctgctgcttcccaaggagacgccgtcgacagcggagtagtggttgctgctgctgcgggggcggcagccagaggtcccagcgctccaacaaccggagctcaggatgctgctccggctgctgagaggcccgcaacccccagcgctgcgctagagaaacccgcccagcccagagcgggcccgccccgctgcggctcccacgcggggctgggcctcggagtttgccccgtaaagcgaattgcactttgatgttcagaaacccactttgttctcagccacgcaaaactccctgaccccgatgtgatttttctccccggggattcgagagccatgcgtgggacactggaccctactgtctacacgggcttgcacacagcaggtgctcagcaaatgcctattgatttgattgtcttttgaagatgtcataataaagcttctacctcctgaaaaa

SEQ ID NO: 1364 - protein, 99 aa, Homo sapien
MSSQQSAVSAKGFSKGSSQGPAPCPAPAPTPAPASSSSCCGSGRGCCGDSGCCGSSSTSCCCFPRRRRRQRSSGCCCCGGGSQRSQRSNNRSSGCCSGC

SEQ ID NO: 1365 - DNA, 1834 bp, Homo sapien
gaaaaatccttgtggttaacagcagaggcttcagagtgtaacctgtactcgggcctagaaattatttaaaatggcgactgatacgtctcaaggtgaactcgtccatcctaaggcactcccacttatagtaggagctcagctgatccacgcggacaagttaggtgagaaggtagaagatagcaccatgccgattcgtcgaactgtgaattctacccgggaaactcctcccaaaagcaagcttgctgaaggggaggaagaaaagccagaaccagacataagttcagaggaatctgtctccactgtagaagaacaagagaatgaaactccacctgctacttcgagtgaggcagagcagccaaagggggaacctgagaatgaagagaaggaagaaaataagtcttctgaggaaaccaaaaaggatgagaaagatcagtctaaagaaaaggagaagaaagtgaaaaaaacaattccttcctgggctaccctttctgccagccagctagccagggcccagaaacaaacaccgatggcttcttccccacgtcccaagatggatgcaatcttaactgaggccattaaggcatgcttccagaagagtggtgcatcagtggttgctattcgaaaatacatcatccataagtatccttctctggagctggagagaaggggttatctccttaaacaagcactgaaaagagaattaaatagaggagtcatcaaacaggttaaaggaaaaggtgcttcttggaagttttgttgtggttcagaaatcaagaaaaaacacctcagaaatccagaaaacagaaagaataggagctctgcagtggatccagaaccacaagtaaaattggaggatggtctcccactggcctttactcgcctttgtgaacctaaagaagcttcctacagtctcatcaggaaatatgtgtctcagtattatcctaagcttagagtggacatcaggcctcagctgttgaagaacgctctgcagagagcagtagagaggggccagttagaacagataactggcaaaggtgcttcggggacattccagctgaagaaatcaggggagaaacccctgcttggtggaagcctgatggaatatgcaatcttgtctgccattgctgccatgaatgagccgaagacctgctctaccactgctctgaagaagtatgtcctagagaatcacccaggaaccaattctaactatcaaatgcatttgctgaaaaaaaccctgcagaaatgcgaaaagaatgggtggatggaacagatctctgggaaagggttcagtggcaccttccagctctgttttccctattatcccagcccaggagttctgtttccgaagaaagagccagatgattctagagatgaggatgaagatgaagatgagtcatcagaagaagactctgaggatgaagagccgccacctaagagaaggttgcagaagaaaaccccagccaagtccccagggaaggccgcatctgtgaagcagagagggtccaaacctgcacctaaagtctcagctgcccagcgggggaaagctaggcccttgcctaagaaagcacctcctaaggccaaaacgcctgccaagaagaccagaccctcatccacagtcatcaagaaacctagtggtggctcctcaaagaagcctgcaaccagtgcaagaaaggaagtaaaattgccgggcaagggcaaatccaccatgaagaagtctttcagagtgaaaaagtaaattttataggaaaaaagggtatgatgatgaaattcaaaatcttattttctaagcacttttgatatcaagcaagtggcttcctttttgagatattaaaac

SEQ ID NO: 1366 - protein, 554 aa, Homo sapien
MATDTSQGELVHPKALPLIVGAQLIHADKLGEKVEDSTMPIRRTVNSTRETPPKSKLAEGEEEKPEPDISSEESVSTVEEQENETPPATSSEAEQPKGEPENEEKEENKSSEETKKDEKDQSKEKEKKVKKTIPSWATLSASQLARAQKQTPMASSPRPKMDAILTEAIKACFQKSGASVVAIRKYIIHKYPSLELERRGYLLKQALKRELNRGVIKQVKGKGASWKFCCGSEIKKKHLRNPENRKNRSSAVDPEPQVKLEDGLPLAFTRLCEPKEASYSLIRKYVSQYYPKLRVDIRPQLLKNALQRAVERGQLEQITGKGASGTFQLKKSGEKPLLGGSLMEYAILSAIAAMNEPKTCSTTALKKYVLENHPGTNSNYQMHLLKKTLQKCEKNGWMEQISGKGFSGTFQLCFPYYPSPGVLFPKKEPDDSRDEDEDEDESSEEDSEDEEPPPKRRLQKKTPAKSPGKAASVKQRGSKPAPKVSAAQRGKARPLPKKAPPKAKTPAKKTRPSSTVIKKPSGGSSKKPATSARKEVKLPGKGKSTMKKSFRVKK

SEQ ID NO: 1367 - DNA, 4619 bp, Homo sapien
gaaggcgtcccggcatcggccaagattctacattgctcatctgggcatctgagcctccttcgaagtttcctgtcacaactgtcctcttgacagcatggatgaggaggaagacaatctgtctctgctgaccgcactgctggaagaaaatgagtcagccttggattgtaattcagaagaaaataacttcttgacgcgggaaaatggcgagcccgacgcatttgatgagctctttgatgccgacggcgacggtgaatcttatacagaagaggctgatgatggagaaacaggagagacaagagacgaaaaggaaaatctggccactctctttggagatatggaggacttaacagatgaagaagaagttcccgcatcacagtcaactgaaaatagggtcctccctgctcctgcccccaggcgagagaaaacgaatgaagagttgcaagaggaattaaggaatttgcaagagcaaatgaaggccttacaagagcagctaaaagtaacaacaattaaacagacagcaagcccagcccgtctgcaaaaatcccctgagaagtctccccggccacctcttaaggagaggagagttcagagaattcaggagtcaacatgcttttctgcggagcttgatgtccctgcgctaccaagaaccaagagggtggctcgaacaccaaagccttcacctccagatcccaaaagctcatcttcaaggatgacaagtgcaccctcccaacccctacagacgatttctcggaacaaacctagtgggataactagaggtcaaattgtggggaccccaggaagttctggggaaacgactcaacccatctgtgtggaagccttctctggtctgcggctcaggcggcctcgagtatcctccacagaaatgaacaagaaaatgaccggccgaaaactgatcagactgtctcagatcaaggaaaagatggccagagagaagctggaagaaatagattgggtgacatttggggttatattgaagaaggttacgccacagagtgtgaatagtggaaaaaccttcagcatatggaaactgaatgatcttcgtgacctgacacaatgtgtgtccttgttcttatttggagaagttcacaaagcgctctggaagacggagcaggggactgtcgtagggatcctcaatgccaaccccatgaagcccaaggatggttcagaggaggtgtgtttatctatcgatcatcctcagaaggtcttaattatgggtgaagctcttgacctgggaacctgtaaagccaagaagaagaatggagagccgtgcacgcagactgtgaatttgcgtgactgtgagtactgtcagtaccatgtccaggctcagtacaagaagctcagtgcaaagcgtgcggatctgcagtccaccttctctggaggacgaattccaaagaagtttgcccgcagaggcaccagcctcaaagaacggctgtgccaagatggcttttactacggaggggtttcttctgcctcgtatgcagcttcaattgcagcagctgtggctcctaagaagaagattcaaaccactctgagtaatctggttgttaagggcacaaacttgatcatccaggaaacacggcaaaaactcggaataccccagaagagcctgtcttgctctgaggagttcaaggaactgatggacctgccgacgtgtggagccaggaacttaaaacaacatttagccaaagcctcagcttcagggattatggggagcccaaaaccagccatcaagtccatctcggcctcagcactcttgaagcaacagaagcagcggatgttggagatgaggagaaggaaatcagaagaaatacagaagcgatttctgcagagctcaagtgaagttgagagcccagctgtgccatcttcatcaagacagccccctgctcagcctccacggacaggatccgagttccccaggctggagggagccccggccacaatgacgcccaagctggggcgaggtgtcttggaaggagatgatgttctcttttatgatgagtcaccaccaccaagaccaaaactgagtgctttagcagaagccaaaaagttagctgctatcaccaaattaagggcaaaaggccaggttcttacaaaaacaaacccaaacagcattaagaagaaacaaaaggaccctcaggacatcctggaggtgaaggaacgtgtagaaaaaaacaccatgttttcttctcaagctgaggatgaattggagcctgccaggaaaaaaaggagagaacaacttgcctatctggaatctgaggaatttcagaaaatcctaaaagcaaaatcaaaacacacaggcatcctgaaagaggccgaggctgagatgcaggagcgctactttgagccactggtgaaaaaagaacaaatggaagaaaagatgagaaacatcagagaagtgaagtgccgtgtcgtgacatgcaagacgtgcgcctatacccacttcaagctgctggagacctgcgtcagtgagcagcatgaataccactggcatgatggtgtgaagaggtttttcaaatgtccctgtggaaacagaagcatctccttggacagactcccgaacaagcactgcagtaactgtggcctctacaaatgggaacgggacggaatgctaaaggtatgccatttgcgtactaatttttgactccttttagtgacccatgctaataatgtggaaccatctcctattaaaatattttcatttttctaggaaaagactggtccaaagataggaggagaaactctgttaccaagaggagaagaacatgctaaatttctgaacagccttaaataacccgaacttcagacattttcccacagacttcctggcctcctgtgactctggaaagcaaaggattggctgtgtattgtccattgattcctgattgacgccgtcaaaaacaaatgcttgttaagcccataagctttgcctgcttactttctgccattgggttggtttgataccacatttaacattgacatttaagtggaaaaccaagttatcattgtcttttctaagctcagtgtggatgattgcattacttcattcactgaagtttttgcccaaaaattggaaggtaaacagagagctatgtttctgtatcttttggttatagagtgttcacttctttatcataacaaaattctagtgtttatacgaacacccagaggcaaaagaatttggcttaattctcactccaggtaagtagcttaacttctgggcttcagttttctcatctgtaaaatcaggaagattggactaagtgatcctgaaatgtattttttagcactggatttctacaaataataaaactttcccatctagataatgatgatcacatagtcttgatgtacggacattaaaagccagatttcttcattcaattctgttatctctgttttactctttgaaattgatcaagccactgaatcactttgcatttcagtttatatatagagagagaaagaaggctgtctgctcttacattattgtggagccctgtgatagaaatatgtaaaatctcatattattttttttttaatttttttattttttatgacagggtctcactatgtcaccctggctggagtgcagtagtgcgatcgcggcacactgcagccttggcttccctgggctcaagcagtcctcccacctcagtctcccaaatagctaggactacaggcgtgcgtgaccaagcccagctaatttttgcattttttgtagagatggggttttgccatgttgctcaggctggtctcaaactcctgagcactagcaatccacccacctctgtttccaaaaaaaaaaaaaaaatgaaaggtcaacccctatgcaaattaccacagcaaaggtttcattcaggagattcttccatctgggcaacctggttttccaaatatcatttgacctaagtgaatgttgatactagctaaagattgggtaaattggttgaattattgtattgaagcttgagctgtagctaaaagtaatttaggtttcccctaagatgttattatgttagggacataacacttttgggaggttgttgtgggagatggttgatttaggttttcaaaagctagaaataaaatttacatgccttagatttcataaaattctgctctaattgggtggaaggtgctgtatctaacttgtgttcctcctaaggttatgtcctaataactattcttttaggagtatacttctactttatagaaggttgcttttctttttaattttttctaacaaagaaaagaataaagtatttattaataagaaccagaaagcacttgaaactgatgtttttaatggctcatttagggtagatttatttatctcattaacttaaaacagctatgtgtatgaaataggtcacaacagaacttgaacaccaggttggtgtctgagcaatccctttcttatgggaaaaacaatgttcttgtttgaacagagggtatcattgcagtcagtattcacgtgtatattgttatataagttgtataatatgcttgtaaaggctgagggtgagctgtatctggatgcctttttacaatttgattttaacttttaaaataaatttaaaacataaaaaaaaaaaaaa

SEQ ID NO: 1368 - protein, 855 aa, Homo sapien
MDEEEDNLSLLTALLEENESALDCNSEENNFLTRENGEPDAFDELFDADGDGESYTEEADDGETGETRDEKENLATLFGDMEDLTDEEEVPASQSTENRVLPAPAPRREKTNEELQEELRNLQEQMKALQEQLKVTTIKQTASPARLQKSPEKSPRPPLKERRVQRIQESTCFSAELDVPALPRTKRVARTPKPSPPDPKSSSSRMTSAPSQPLQTISRNKPSGITRGQIVGTPGSSGETTQPICVEAFSGLRLRRPRVSSTEMNKKMTGRKLIRLSQIKEKMAREKLEEIDWVTFGVILKKVTPQSVNSGKTFSIWKLNDLRDLTQCVSLFLFGEVHKALWKTEQGTVVGILNANPMKPKDGSEEVCLSIDHPQKVLIMGEALDLGTCKAKKKNGEPCTQTVNLRDCEYCQYHVQAQYKKLSAKRADLQSTFSGGRIPKKFARRGTSLKERLCQDGFYYGGVSSASYAASIAAAVAPKKKIQTTLSNLVVKGTNLIIQETRQKLGIPQKSLSCSEEFKELMDLPTCGARNLKQHLAKASASGIMGSPKPAIKSISASALLKQQKQRMLEMRRRKSEEIQKRFLQSSSEVESPAVPSSSRQPPAQPPRTGSEFPRLEGAPATMTPKLGRGVLEGDDVLFYDESPPPRPKLSALAEAKKLAAITKLRAKGQVLTKTNPNSIKKKQKDPQDILEVKERVEKNTMFSSQAEDELEPARKKRREQLAYLESEEFQKILKAKSKHTGILKEAEAEMQERYFEPLVKKEQMEEKMRNIREVKCRVVTCKTCAYTHFKLLETCVSEQHEYHWHDGVKRFFKCPCGNRSISLDRLPNKHCSNCGLYKWERDGMLKVCHLRTNF

SEQ ID NO: 1369 - DNA, 6792 bp, Homo sapien
ctccagtccgcatgctcagtagctgctgccggccgggctgcggggcggcgtccgctgcgcgcctacgggctgcggtggcggccgccgcggcacccggcagggcccgccagtccccgcttccctgctccagagccgccgcctgggccggggcagggcgggcccggggctcctccatgctgccagccgccgggctgcggagccgaccaagtggctcctgcgatggcggcggaagaggaggctgcggcgggaggtaaagtgttgagagaggagaaccagtgcattgctcctgtggtttccagccgcgtgagtccagggacaagaccaacagctatggggtctttcagctcacacatgacagagtttccacgaaaacgcaaaggaagtgattcagacccatcccaagtggaagatggtgaacaccaagttaaaatgaaggccttcagagaagctcatagccaaactgaaaagcggaggagagataaaatgaataacctgattgaagaactgtctgcaatgatccctcagtgcaaccccatggcgcgtaaactggacaaacttacagttttaagaatggctgttcaacacttgagatctttaaaaggcttgacaaattcttatgtgggaagtaattatagaccatcatttcttcaggataatgagctcagacatttaatccttaagactgcagaaggcttcttatttgtggttggatgtgaaagaggaaaaattctcttcgtttctaagtcagtctccaaaatacttaattatgatcaggctagtttgactggacaaagcttatttgacttcttacatccaaaagatgttgccaaagtaaaggaacaactttcttcttttgatatttcaccaagagaaaagctaatagatgccaaaactggtttgcaagttcacagtaatctccacgctggaaggacacgtgtgtattctggctcaagacgatcttttttctgtcggataaagagttgtaaaatctctgtcaaagaagagcatggatgcttacccaactcaaagaagaaagagcacagaaaattctatactatccattgcactggttacttgagaagctggcctccaaatattgttggaatggaagaagaaaggaacagtaagaaagacaacagtaattttacctgccttgtggccattggaagattacagccatatattgttccacagaacagtggagagattaatgtgaaaccaactgaatttataacccggtttgcagtgaatggaaaatttgtctatgtagatcaaagggcaacagcgattttaggatatctgcctcaggaacttttgggaacttcttgttatgaatattttcatcaagatgaccacaataatttgactgacaagcacaaagcagttctacagagtaaggagaaaatacttacagattcctacaaattcagagcaaaagatggctcttttgtaactttaaaaagccaatggtttagtttcacaaatccttggacaaaagaactggaatatattgtatctgtcaacactttagttttgggacatagtgagcctggagaagcatcatttttaccttgtagctctcaatcatcagaagaatcctctagacagtcctgtatgagtgtacctggaatgtctactggaacagtacttggtgctggtagtattggaacagatattgcaaatgaaattctggatttacagaggttacagtcttcttcataccttgatgattcgagtccaacaggtttaatgaaagatactcatactgtaaactgcaggagtatgtcaaataaggagttgtttccaccaagtccttctgaaatgggggagctagaggctaccaggcaaaaccagagtactgttgctgtccacagccatgagccactcctcagtgatggtgcacagttggatttcgatgccctatgtgacaatgatgacacagccatggctgcatttatgaattacttagaagcagaggggggcctgggagaccctggggacttcagtgacatccagtggaccctctagcctttgatttttaactccaaaaatgagaaacattttaaagcattatttacgaaaaaactgtctcaactattcttaagtactgtattgatattgtttgtatcttttattaatgttctaccactttttatagatttgcatcttcctgtcacagggatgtggggaaatacgttttcctcccaagagaaccaagtttattatagactcctttattcagtgaaatggcttataatccactagttgccatatttttgctaaaatatttctaaccaagaatactacttacatattgttttggctttgttttatttttgatgcagttttttttagttgaggtaatgtaatatattgatgttttcctttgtgtctaagattgatttataatagtaggtttgtataatttggaacattttccatgccttgcgaatttccttaattgaggatagggcttacacactttaagaaaacagtgagtacttgaacatttaaagggacagtgcaatttatagtcataatcacattgaatactgtatttgatctttggagacttaggcaagcacagagctgggatatttatgctcagttgagcactttaagatgaattttaagtgagatgatttcttgcttaaaactcagaaagtcaaaagagtttcagctttccttacagaaaaggaaggatcttgggccctagatcttggggattaacctctgcatataagatttactcttaataggccagacgtggtgctcacgcctgtaatcccagtactttgggaggctgagacgggcagatcacttgaggtcaggagttcaagaccagcctggccaatatggtgaaaccccgtttctactaaaaatacaaaaaaaattacccaggcactcactcttgaggtaactaaccaactcccacgataatgacagtccattcatgagcgcaaaggcctcatgacctaatggcacacacctgtaatcccaactgcttgggaggctgaggcgagaggattgcttgaacctgggaggcagaggttgcagtgagccgagatcgcaccactgcactccagtctgggcaacagagtgagacttcatctcaaaaaaagtaaaaaaaaagatttaatataatcactgaagatctctattatagatagattaggtttttgacattggaaacatacttagggatagatttgtcctaaaggaaaaaagtaggcccgggcagattaaatgtcttgtgtaaagtcacacattaaattcagtcacacattaaattcatagagttttaaatgtttaatgtatataaaccagtttctttatacacatttgggaaaacattggtctcacagattaaatgattaactaactgacccaggaactagttgtagctttctaagtaattaggcaattacagttattgcctgtaaccaaaggtaataaaacaaaatgacaagtacatgtttaaaattatgaggcaatgagaaataatttaaaaaccaattttctagttataatttaaaatttggagagcatttttaacagtaattaatccagaggtggctcaaattgagtataagaattaagattatttaaaatactgcatgtctaccttctcggggatcatactttataacactttctgcttcagtagctcttcatagcttgccaagtatgctcccatattttctctctcgtgcctcgcaaatgaaagtcagataggctgggaactcatggggcagccctcagacttcaatgtgggcttcaaatccagtttcctgttctatatggtgctacatctttccagaaaatttccctcagagcccctcgccaaaacaaagcattattttgaccctgcatgctatttctttagctgtaggtgatagattagaacttctgtcagacatgttaatgacaaacataccaacagacaataaccaaagcaaatgtttccttcaagtgtgaaatgtgcaggggctcgtgggcaaggatgtattggcacactgtcctcttgaactgatagtgtcccagcaatgttggaggttggcaccattcctggtccgacacttgaggacctgagagacatcaggtttagaatgagccaaagaaatcctacaagatggggagaattggtgtgcagcagcctaagtgttatagttaagtctaaagaagtatgaaagatcccctgtgttctctaaattgagcagaggggcctgcctaccaatatcactttttaggggactgaaccattgcaggttagacttggcttccaaagagtctgcctaagccaggggtggcagggtaggccatcatagctggatggcctcaaaagcagatgggggcagacttgccctcgtgatgccaggatttgagaggcagagtttctagagggagaccagtgctgcctctcacagtggcagttttttctctttgcaagaggaggggctgttcaattccatagaccagtgggcagatagccagttgaatactctgtgcatggtttgatcctttattagttcgctctaatatttttctgtagatccttttgtcctggactcaaaatctaatccatgcattgtatgataccgtagctctcctaaggtttgtgtttccttcaaaatgttttagttttcttcaactaaatttgatttttgctgttagaagtgacatatttttatggtatacactatgttccttttttctactgcgagtcaattttttgaattttcgtgagaaagaatatatctacaaattgcacgaaagtatcataaaaacagtactctagagcagcgctgtccaatagaaatataatctgagccacatgtataattttattttcttctagccacattaaagaagtaaaaagatacaagtagaactaattttaatgttttaattcagtatatccaaaatatcatttgaacatgtaattaatataaaattattaatgtgatattttacattcttttggtaatactagtcttcaaaatctggtatgtatcttacattgatagcacatctcactttgtactagccacattgcaagtgctcagtagccacatgtggctagtggctactgcactggacagcacagttctaggttccaccctaacacccaagtcctgtggattagaatcccagaatcagagctggaagtaaacatagagatcaaacctccttttaaaaatgaggacgctgaggcacagagtttaaatggcttgcatgaggtcatacagctaaattcagcctcaacagggtcttctgattccaggcactcttcccactccactacattactgtagtggtaattcttagggttaaaaaaagtgtagagtaggccgggcgcagtggctcatgcctgtaatcccagcactttgggaggccgaagtgggcggatcacgaggtcaggagatcgagaccatcctggccaacatggtgaaaccccgtctctactgaaaatacaaagcaaaattagccaggtgtggtggcgggcgcctgtggtcccagctgctctggaggctgaggcagaatggcgtgaacccaggaggcagagatggcagtgagccaagatcgcgccactgcaccccagcctgggcgacagagcgagactccatctcaaaaaaaaaaaaaaaaaaaaaagaaaagaaaagaaaagtctagagaacattatattaagtggttattattgaagtagaccaaagtttataccataaggatatttttccttaaataccatgtttgaagaacaattatttattgatccttgaatctgtaagatcaaataacaagtctctatccatgttaccaaatttaaccttttgaaaataataaactttaaaatatcagatgtgttattacaggatgatacttggaatcaagtgaaatgagttatatggtcatcactaaatttagaaatctattgtgaaacaaagacaaacaggaaagtacagaatagagacttttagtaaataaatggaatttaaaagaaagtgtttatttacagtgtcacgacagaaaaggatgtctttgttgtcatagtctttgagggatctccgtaaaatctggggcacaggtacaagaaatagccaatatttagttcccagaccatgtttagtagtgtccagtttcagatcatgctgccaagaggtatctccccctcaggtgggtcatcactgagccctggaattggagactcatacttgcccagcacaatgttacgggcagacaggccgacatctatgattagctagaagccataaagaaaagctgctaagtggccactaggtgccacttttctgtttttgtaatgctttcattagcagatcttttttttccaagctccatggggcctatgagaggcatttatgatttttgtgcctacaataagtcagcctgtctggtgtgagttgttttatgagaaatgctttccaagggaggtctaggaagatcctgacacataagaactttggcttagagagctttccaggtgtagtgccaataaaaactgacctggaaagaaaacctgcccagcacggaacatgctttctgaactcacttgagagtgtatggtgtatgtcacttctcatatattcttgagtttagatttgtcttttatacaatttttagctcttttccagttcacttgtgctcgtctgtatattggtatttttaaatttttgtggtaaataatgaaaagagtgaaattatattttataattactcatttgtagtttttttttttaatttaataaacttcctccaaaaagtgctcccttaaaa

SEQ ID NO: 1370 - protein, 602 aa, Homo sapien
MAAEEEAAAGGKVLREENQCIAPVVSSRVSPGTRPTAMGSFSSHMTEFPRKRKGSDSDPSQVEDGEHQVKMKAFREAHSQTEKRRRDKMNNLIEELSAMIPQCNPMARKLDKLTVLRMAVQHLRSLKGLTNSYVGSNYRPSFLQDNELRHLILKTAEGFLFVVGCERGKILFVSKSVSKILNYDQASLTGQSLFDFLHPKDVAKVKEQLSSFDISPREKLIDAKTGLQVHSNLHAGRTRVYSGSRRSFFCRIKSCKISVKEEHGCLPNSKKKEHRKFYTIHCTGYLRSWPPNIVGMEEERNSKKDNSNFTCLVAIGRLQPYIVPQNSGEINVKPTEFITRFAVNGKFVYVDQRATAILGYLPQELLGTSCYEYFHQDDHNNLTDKHKAVLQSKEKILTDSYKFRAKDGSFVTLKSQWFSFTNPWTKELEYIVSVNTLVLGHSEPGEASFLPCSSQSSEESSRQSCMSVPGMSTGTVLGAGSIGTDIANEILDLQRLQSSSYLDDSSPTGLMKDTHTVNCRSMSNKELFPPSPSEMGELEATRQNQSTVAVHSHEPLLSDGAQLDFDALCDNDDTAMAAFMNYLEAEGGLGDPGDFSDIQWTL

SEQ ID NO: 1371 - DNA, 678 bp, Homo sapien
agaggttctcagcctcatgactcctaaactcctggtacttgagcaccgatctgcttcggagaacctgattctgagactccagcaggatgtcttatcaacagtagcaatgtaagcagccctgccagccacctcctgtgtgccgcctgccaaagcgtccagagccatgtccacccctgaagtgccctgagccctgcccaccaccaaagtgtccacagccctgcccacctcagcagtgccagcagaaatatcctctggtgacaccttccccaccctgccagccaaagtgtccacccaagagcaagtaacagcttcggaattcatcaggaccacgaaaggatagggataattggctcacctcgttccacagctccacctgcatcttctcatcaaagccatccagggatacacagggagcttctttccccttagcctgtgatctgcccatgatgatccccgacagcaaaatgtttcctttctgaggctgccatgctgccactgtccaggtggagactgagcaaaggaagtcctcagctgtaccggcctttcagagcttctctttgggtgccatcaaagaattattttgatgtcttctgtctctgtctgtcacctggcatgagcttctactatctgtgcaattgtcacttttctttcactccctgaataaagtagctatgccta

SEQ ID NO: 1372 - protein, 72 aa, Homo sapien
  unsure 6: unknown amino acid
MSYQQXQCKQPCQPPPVCRLPKRPEPCPPLKCPEPCPPPKCPQPCPPQQCQQKYPLVTPSPPCQPKCPPKSK

SEQ ID NO: 1373 - DNA, 2805 bp, Homo sapien
atggtccgaggggggcggggctgacgtcgcgctgggaatgccctggccgagacactgaggcagggtagagagcgcttgcgggcgccgggcggagctgctgcggatcaggacccgagccgattcccgatcccgacccagatcctaacccgcgcccccgccccgccgccgccgccatgtacgacgcagagcgcggctggagcttgtccttcgcgggctgcggcttcctgggcttctaccacgtcggggcgacccgctgcctgagcgagcacgccccgcacctcctccgcgacgcgcgcatgttgttcggcgcttcggccggggcgttgcactgcgtcggcgtcctctccggtatcccgctggagcagactctgcaggtcctctcagatcttgtgcggaaggccaggagtcggaacattggcatcttccatccatccttcaacttaagcaagttcctccgacagggtctctgcaaatgcctcccggccaatgtccaccagctcatctccggcaaaataggcatctctcttaccagagtgtctgatggggaaaacgttctggtgtctgactttcggtccaaagacgaagtcgtggatgccttggtatgttcctgcttcatccccttctacagtggccttatccctccttccttcagaggcgtgcgatatgtggatggaggagtgagtgacaacgtacccttcattgatgccaaaacaaccatcaccgtgtcccccttctatggggagtacgacatctgccctaaagtcaagtccacgaactttcttcatgtggacatcaccaagctcagtctacgcctctgcacagggaacctctaccttctctcgagagcttttgtccccccggatctcaaggtgctgggagagatatgccttcgaggatatttggatgcattcaggttcttggaagagaagggcatctgcaacaggccccagccaggcctgaagtcatcctcagaagggatggatcctgaggtcgccatgcccagctgggcaaacatgagtctggattcttccccggagtcggctgccttggctgtgaggctggagggagatgagctgctagaccacctgcgtctcagcatcctgccctgggatgagagcatcctggacaccctctcgcccaggctcgctacagcactgagtgaagaaatgaaagacaaaggtggatacatgagcaagatttgcaacttgctacccattaggataatgtcttatgtaatgctgccctgtaccctgcctgtggaatctgccattgcgattgtccagagactggtgacatggcttccagatatgcccgacgatgtcctgtggttgcagtgggtgacctcacaggtgttcactcgagtgctgatgtgtctgctccccgcctccaggtcccaaatgccagtgagcagccaacaggcctccccatgcacacctgagcaggactggccctgctggactccctgctcccccaagggctgtccagcagagaccaaagcagaggccaccccgcggtccatcctcaggtccagcctgaacttcttcttgggcaataaagtacctgctggtgctgaggggctctccacctttcccagtttttcactagagaagagtctgtgagtcacttgaggaggcgagtctagcagattctttcagaggtgctaaagtttcccatctttgtgcagctacctccgcattgctgtgtagtgacccctgcctgtgacgtggaggatcccagcctctgagctgagttggttttatgaaaagctaggaagcaacctttcgcctgtgcagcggtccagcacttaactctaatacatcagcatgcgttaattcagctggttgggaaatgacaccaggaagcccagtgcagagggtcccttactgactgtttcgtggccctattaatggtcagactgttccagcatgaggttcttagaatgacaggtgtttggatgggtgggggccttgtgatggggggtaggctggcccatgtgtgatcttgtggggtggagggaagagaatagcatgatcccacttccccatgctgtgggaaggggtgcagttcgtccccaagaacgacactgcctgtcaggtggtctgcaaagatgataaccttgactactaaaaacgtctccatggcgggggtaacaagatgataatctacttaattttagaacacctttttcacctaactaaaataatgtttaaagagttttgtataaaaatgtaaggaagcgttgttacctgttgaattttgtattatgtgaatcagtgagatgttagtagaataagccttaaaaaaaaaaaaatcggttgggtgcagtggcacacggctgtaatcccagcactttgggaggccaaggttggcagatcacctgaggtcaggagttcaagaccagtctggccaacatagcaaaaccctgtctctactaaaaatacaaaaattatctgggcatggtggtgcatgcctgtaatcccagctattcggaaggctgaggcaggagaatcacttgaacccaggaggcggaggttgcggtgagctgagattgcaccatttcattccagcctgggcaacatgagtgaaagtctgactcaaaaaaaaaaaatttaaaaaacaaaataatctagtgtgcagggcattcacctcagccccccaggcaggagccaagcacagcaggagcttccgcctcctctccactggagcacacaacttgaacctggcttattttctgcagggaccagccccacatggtcagtgagtttctccccatgtgtggcgatgagagagtgtagaaataaagac

SEQ ID NO: 1374 - protein, 481 aa, Homo sapien
MYDAERGWSLSFAGCGFLGFYHVGATRCLSEHAPHLLRDARMLFGASAGALHCVGVLSGIPLEQTLQVLSDLVRKARSRNIGIFHPSFNLSKFLRQGLCKCLPANVHQLISGKIGISLTRVSDGENVLVSDFRSKDEVVDALVCSCFIPFYSGLIPPSFRGVRYVDGGVSDNVPFIDAKTTITVSPFYGEYDICPKVKSTNFLHVDITKLSLRLCTGNLYLLSRAFVPPDLKVLGEICLRGYLDAFRFLEEKGICNRPQPGLKSSSEGMDPEVAMPSWANMSLDSSPESAALAVRLEGDELLDHLRLSILPWDESILDTLSPRLATALSEEMKDKGGYMSKICNLLPIRIMSYVMLPCTLPVESAIAIVQRLVTWLPDMPDDVLWLQWVTSQVFTRVLMCLLPASRSQMPVSSQQASPCTPEQDWPCWTPCSPKGCPAETKAEATPRSILRSSLNFFLGNKVPAGAEGLSTFPSFSLEKSL

SEQ ID NO: 1375 - DNA, 2486 bp, Homo sapien
acactgcctcggttcggcaagtgggtcagttggctggggctcacttggcaacgggacgcgggaacgaggggcgcggacgcaggcccgggaggacgcggcggcgggaacctgggggcgcagggctagggcagcgggcccgacccgcacggctttcctggaaagcgctgcccctcgccgcggcgatgacctcgctgtggagagaaatcctcttggagtcgctgctgggatgtgtttcttggtctctctaccatgacctgggaccgatgatctattactttcctttgcaaacactagaactcactgggcttgaaggttttagtatagcatttctttctccaatattcctaacaattactcctttctggaaattggttaacaagaagtggatgctaaccctgctgaggataatcactattggcagcatagcctccttccaggctccaaatgccaaacttcgactgatggttcttgcgcttggggtgtcttcctcactgatagtgcaagctgtgacttggtggtcaggaagtcatttgcaaaggtacctcagaatttggggattcattttaggacagattgttcttgttgttctacgcatatggtatacttcactaaacccaatctggagttatcagatgtccaacaaagtgatactgacattaagtgccatagccacacttgatcgtattggcacagatggtgactgcagtaaacctgaagaaaagaagactggtgaggtagccacggggatggcctctagacccaactggctgctggcaggggctgcttttggtagccttgtgttcctcacccactgggtttttggagaagtctctcttgtttccagatgggcagtgagtgggcatccacatccagggccagatcctaacccatttggaggtgcagtactgctgtgcttggcaagtggattgatgcttccatcttgtttgtggtttcgtggtactggtttgatctggtgggttacaggaacagcttcagctgcggggctcctttacctgcacacatgggcagctgctgtgtctggctgtgtcttcgccatctttactgcatccatgtggccccaaacacttggacaccttattaactcagggacaaaccctgggaaaaccatgaccattgccatgatattttatcttctagaaatatttttctgtgcctggtgcacagcttttaagtttgtcccaggaggtgtctacgctagagaaagatcagatgtgcttttggggacaatgatgttaattatcgggctgaatatgctatttggtcctaagaaaaaccttgatttgcttcttcaaacaaaaaacagttctaaagtgcttttcagaaagagtgaaaaatacatgaaactttttctgtggctgcttgttggtgtgggattgttgggattaggactacggcataaagcctatgagagaaaactgggcaaagtggcaccaaccaaagaggtctctgctgccatctggcctttcaggtttggatatgacaatgaagggtggtctagtctagaaagatcagctcacctgctcaatgaaacaggtgcagatttcataacaattttggagagtgatgcttctaagccctatatggggaacaatgacttaaccatgtggctaggggaaaagttgggtttctatacagactttggtccaagcacaaggtatcacacttgggggattatggctttgtcaagatacccaattgtgaaatctgagcatcaccttcttccgtcaccagagggcgagatcgcaccagccatcacattgaccgttaacatttcgggcaagctggtggattttgtcgtgacacactttgggaaccacgaagatgacctcgacaggaaactgcaggctattgctgtttcaaaactactgaaaagtagctctaatcaagtgatatttctgggatatatcacttcagcacctggctccagagattatctacagctcactgaacatggcaatgtgaaggatatcgacagcactgatcatgacagatggtgtgaatacattatgtatcgagggctgatcaggttgggttatgcaagaatctcccatgctgaactgagtgattcagaaattcagatggcaaaatttaggatccctgatgaccccactaattatagagacaaccagaaagtggtcatagaccacagagaagtttctgagaaaattcattttaatcccagatttggatcctacaaagaaggacacaattatgaaaacaaccataattttcatatgaatactcccaaatactttttatgaaacatttaaaacaagaagttattggctgggaaaatctaagaaaaaaagtatgtaagataaaaagaagagattaatgaaagtgggaaaatacacatgaagaacctcaacttaaaaaacacatggtatctatgcagtgggaaattacctccatttgtaaactatgttgcttaataaaaacatttctctaaaaaaaaaaaaaaaaaa

SEQ ID NO: 1376 - protein, 699 aa, Homo sapien
MTSLWREILLESLLGCVSWSLYHDLGPMIYYFPLQTLELTGLEGFSIAFLSPIFLTITPFWKLVNKKWMLTLLRIITIGSIASFQAPNAKLRLMVLALGVSSSLIVQAVTWWSGSHLQRYLRIWGFILGQIVLVVLRIWYTSLNPIWSYQMSNKVILTLSAIATLDRIGTDGDCSKPEEKKTGEVATGMASRPNWLLAGAAFGSLVFLTHWVFGEVSLVSRWAVSGHPHPGPDPNPFGGAVLLCLASGLMLPSCLWFRGTGLIWWVTGTASAAGLLYLHTWAAAVSGCVFAIFTASMWPQTLGHLINSGTNPGKTMTIAMIFYLLEIFFCAWCTAFKFVPGGVYARERSDVLLGTMMLIIGLNMLFGPKKNLDLLLQTKNSSKVLFRKSEKYMKLFLWLLVGVGLLGLGLRHKAYERKLGKVAPTKEVSAAIWPFRFGYDNEGWSSLERSAHLLNETGADFITILESDASKPYMGNNDLTMWLGEKLGFYTDFGPSTRYHTWGIMALSRYPIVKSEHHLLPSPEGEIAPAITLTVNISGKLVDFVVTHFGNHEDDLDRKLQAIAVSKLLKSSSNQVIFLGYITSAPGSRDYLQLTEHGNVKDIDSTDHDRWCEYIMYRGLIRLGYARISHAELSDSEIQMAKFRIPDDPTNYRDNQKVVIDHREVSEKIHFNPRFGSYKEGHNYENNHNFHMNTPKYFL

SEQ ID NO: 1377 - DNA, 2296 bp, Homo sapien
ataattcaccaataaaggacttacaggtgttcataacttgtctaagctcaaatctcccatatataacttgctggcaaatcatttattccagggcattagctatgagttgctagctttaagttgaactatatcctgtcatggcttacttcgaattgacatgctgcaggctgtatcttgacatgaacaagatagcatgtgatgtggctttgttttaattcagttagccactggtttttaatgtgtgggttatattctactcccaaagcaaaattctgtggcatctctggaatactacctgagaatttttgtgtgccatgtcgaagaaacgcaaatgggatgatgactatgttcgctactggttcacctgtacaacggaagtagatggaactcagcgtccacagtgtgtgttgtgtaactcagtattttcaaatgctgacctcagaccatcaaaactgtcagaccattttaacagacagcatggtggtgtagctgggcatgatctcaatagcctgaagcatatgccagcaccatctgatcagagtgaaaccttgaaagcatttggagttgcatctcatgaggatactttattacaagcatcgtatcaatttgcgtatttatgtgccaaggagaagaatcctcatacagtagctgaaaagttagtgaaaccttgtgcactggaaatagcacaaatagttttgggaccagatgcacaaaaaaagcttcagcaggtacccttatcagatgatgtgatccattctagaattgatgaaatgagccaggatatcttacagcaagttctagaagatatcaaagccagtcctcttaaagtgggtattcagcttgctgagacaactgacatggatgactgcagtcagctaatggcatttgtgcgctatataaaagaaagagagatcgtagaagaatttctcttctgtgaaccattgcagctatccatgaaaggaatagatgtgttcaatctcttcagagacttctttctgaagcataagatagcacttgatgtatgtggctctgtttgtactgatggtgcctcctctatgctaggagaaaattccgagtttgttgcctacgtgaaaaaagagatacctcatatcgtagttacacattgtttattgaatcctcatgcacttgtcataaagacattgcctacaaaactgagggatgctctgtttactgtggtgagggtaataaatttcatcaaagggagagctccaaatcatcgcctatttcaggctttctttgaagaaattggcatagaatatagtgtcctccttttccatactgaaatgaggtggctttcccgaggccaaatacttactcacatttttgaaatgtatgaagaaataaatcagtttcttcaccacaagagcagtaatttagttgatggctttgaaaataaagagtttaaaattcacctagcataccttgcagatttattcaaacacttaaatgaactcagtgcatctatgcagaggactgggatgaacacagtatcagctagagagaagttatctgcttttgttaggaagtttccattttggcaaaaacgaattgagaaaagaaattttaccaattttccttttcttgaagaaataattgtttcggataatgaaggcatattcattgcagctgaaataacactgcatctgcaacaattgagcaacttcttccatggatatttttccattggagatcttaatgaggcaagtaaatggatattggatccatttctttttaatatcgattttgttgatgatagttatttaatgaaaaatgatcttgctgaattacgagctagtggccaaatcctaatggaatttgagacaatgaagcttgaggatttctggtgtgcccaattcacagcatttccaaacctggcaaagacagctctagaaatccttatgccatttgcaactacatacctttgtgagttgggattttcatcacttttacatttcaaaccaaagtccagaagctgctttaatctgagtgatgatatccgtgtggctatttcaaaaaaagttcctcgtttctcggacatcattgaccaaaagctacagctacaacagaagtcactgtaagctgatatacttttttaatgaataatttcaatcttaatatcattgtaaaattaagctgtaattctgtctctttcatatttatgatatactgaattctatgtctaaaaaacttaagaactttaattttgaatgaggcatgtgaaaatatgttttgagaataaaaacacagcagaaaagattaagtaaaaaaaaaaaaa

SEQ ID NO: 1378 - protein, 594 aa, Homo sapien
MSKKRKWDDDYVRYWFTCTTEVDGTQRPQCVLCNSVFSNADLRPSKLSDHFNRQHGGVAGHDLNSLKHMPAPSDQSETLKAFGVASHEDTLLQASYQFAYLCAKEKNPHTVAEKLVKPCALEIAQIVLGPDAQKKLQQVPLSDDVIHSRIDEMSQDILQQVLEDIKASPLKVGIQLAETTDMDDCSQLMAFVRYIKEREIVEEFLFCEPLQLSMKGIDVFNLFRDFFLKHKIALDVCGSVCTDGASSMLGENSEFVAYVKKEIPHIVVTHCLLNPHALVIKTLPTKLRDALFTVVRVINFIKGRAPNHRLFQAFFEEIGIEYSVLLFHTEMRWLSRGQILTHIFEMYEEINQFLHHKSSNLVDGFENKEFKIHLAYLADLFKHLNELSASMQRTGMNTVSAREKLSAFVRKFPFWQKRIEKRNFTNFPFLEEIIVSDNEGIFIAAEITLHLQQLSNFFHGYFSIGDLNEASKWILDPFLFNIDFVDDSYLMKNDLAELRASGQILMEFETMKLEDFWCAQFTAFPNLAKTALEILMPFATTYLCELGFSSLLHFKPKSRSCFNLSDDIRVAISKKVPRFSDIIDQKLQLQQKSL

SEQ ID NO: 1379 - DNA, 2719 bp, Homo sapien
atgggggcgtgggccctggcaagtgcactcctcagccaatcagcgtcctgcccggctggtggattcggttacaagcccaagatcaccccatactccagcctctttcctcctcctcccgcagctccattcattggtcccgccgcaccgggcctgctgggctccgcttccgttccactgctcagctgccgcctggtggggccaccaagggcaggcatcccaggggctttgtctgactggactgggccagtgcagaatgggggttcaggcagggctgtttgggatgctgggcttcctgggggtggccctggggggctcccctgccctccgctggtacaggacctcctgccacttgaccaaggccgtccctggcaacccactggggtacctgagcttcctggccaaggatgctcagggactggccctgatccatgcccgctgggatgcgcataggaggctgcaggcatgtagctgggaggatgagccggagctcaccgcagcctacggtgctctctgtgctcatgagactgcctggggctccttcatccacacccccggacccgagctgcagagagcactggccactcttcagagtcagtgggaggcatgccgagcgcttgaggagagtccagcaggggccaggaagaagcgagcagcagggcagagtggagtccctggtggagggcaccagcgagagaagagaggatggaccatgcctggcacactgtggtgtggagttggagattctgctgggaactcctcggagctgggggtcttccagggacctgatctctgttgccgggaacatgaccgctgcccacagaacatctcacccttgcagtacaactatggcatccgaaactaccgattccacaccatctcccactgtgactgtgacaccaggtttcagcaatgcctacagaatcagcacgactccatctcggacatcgtgggcgtggccttcttcaacgtgctggagatcccctgctttgtgctggaggagcaggaggcgtgtgtggcgtggtactggtggggcgggtgtaggatgtacggcacagtgcccctcgctcgcctgcagcccaggaccttctacaatgcctcctggagctcccgggccacctccccaactcccagctcccggagcccagcccctcccaagcctcgacagaagcagcaccttcggaaggggccaccacatcagaaagggtccaagcgccccagcaaagccaacaccacagccctccaggaccctatggtctctcccaggcttgatgtggcccccacaggcctccagggcccacagggtggcctaaaacctcagggtgcccgctgggtctgccgcagcttccgccgccacctggaccagtgtgagcaccagattgggccccgggaaatcgagttccagctgctcaacagcgcccaagagcccctcttccactgcaactgcacgcgccgtctggcacgcttcctgaggctccacagcccacccgaggttaccaacatgctttgggagctgctgggcacaacctgcttcaagctggcccctccactggactgtgtggaaggcaaaaactgttccagagaccctagggccatcagggtgtcagcccggcacttgcggaggcttcagcagaggcgacaccagctccaggataaaggcacagatgagaggcagccatggccttcagagcccctgagaggccccatgtcattctacaaccagtgcctgcagctaacccaggcagccaggagacccgacaggcagcagaagtcctggagccagtgacctcagtttcagctttcctgggcaccagcctggaccttgcccatggctatgccaagccttgggaatctcagcctcccctccgtaggttagactgaagcatggcagaggctgttgtggacaatcaagaggatgaatggggggatctcaaggcccaaatgctggaccacatctcctgctgttctgggtaaccttgagctatgtatgacacaactcttctatgcctggatgtggtgttcaggaagctcattctgatgccctgggctttggccttgccagggaacttcacatacagatgagaatggggaaagggtaacttattgcagcagccccaggcagtaccaggaggaggtacatgtatgtccgtgttgcaaaaataatacatgcctcaaaaacctgcctaggggagccctagtgcctgggtgctgtggcctgaggtagcaggtgggaagttagggatgtcacagaaatgtctgtgtctgaatccaggattggggtgggtgttggagagggctttcagctcccctcctcccaggggggcctctttttttaacggctgccgtgcccttcctggcccagccctaaacctaaattcaaatctcctccatgcctttgcgcaaaggacctccctcttgcactctaagccttagtttcctcctctaaaaaaagggggtctctaaacaggagctacctcatagggttgttgaggattaagtgaaccaatacatatacagtgcttagcacttaataagtattcccccctgcgacacctagctgaactatggtttggtgtctgatcttgagaggttgatgtaaccttttaaaggcctcagttcgctcacctgtgaaatgggtctaagaatagcactgatctcacagggttgtgatgcagattaaaggagatggcatgtgtaatgaaaaaaaaaaaaaaaaaaaaaa

SEQ ID NO: 1380 - protein, 509 aa, Homo sapien
MGVQAGLFGMLGFLGVALGGSPALRWYRTSCHLTKAVPGNPLGYLSFLAKDAQGLALIHARWDAHRRLQACSWEDEPELTAAYGALCAHETAWGSFIHTPGPELQRALATLQSQWEACRALEESPAGARKKRAAGQSGVPGGGHQREKRGWTMPGTLWCGVGDSAGNSSELGVFQGPDLCCREHDRCPQNISPLQYNYGIRNYRFHTISHCDCDTRFQQCLQNQHDSISDIVGVAFFNVLEIPCFVLEEQEACVAWYWWGGCRMYGTVPLARLQPRTFYNASWSSRATSPTPSSRSPAPPKPRQKQHLRKGPPHQKGSKRPSKANTTALQDPMVSPRLDVAPTGLQGPQGGLKPQGARWVCRSFRRHLDQCEHQIGPREIEFQLLNSAQEPLFHCNCTRRLARFLRLHSPPEVTNMLWELLGTTCFKLAPPLDCVEGKNCSRDPRAIRVSARHLRRLQQRRHQLQDKGTDERQPWPSEPLRGPMSFYNQCLQLTQAARRPDRQQKSWSQ

SEQ ID NO: 1381 - DNA, 1908 bp, Homo sapien
gagcgccttcccgttcccggtgaccgtgtcgctgtgccacatcctggctctgtgcgctgggctcccgccgctgctgcgcgcctggcgcgtgccccccgcgccgcccgtctcgggccccggacccagtccgcatccgtcgtccggcccgctgctgccgccgcgcttctacccgcgctacgtgctaccgctcgccttcggcaagtacttcgcgtccgtgtcagcgcacgtcagcatctggaaggtgcccgtgtcctatgcacacaccgtcaaggccaccatgcccatctgggtggtcctcctgtcccggatcattatgaaggagaagcagagcaccaaggtatacttgtcactcatccccatcatcagcggtgtcctgctggccaccgtcaccgagttgtcttttgacatgtggggactcgtcagcgccctcgccgccacgctgtgcttctcgcttcagaacattttctccaaaaaggtcttgcgagattcacggatccaccatctccggctgctcaacatcctgggctgccacgccgtcttctttatgatccccacctgggttctggtggacctctcggctttcctggtcagcagcgacttggtgagttgtacagcaccaagaacacgccattttcttggctagttccagaataggtgctttgttgaggagctgtagctgcatgttaacattgtggtatcttttgggcacctgacagccagcgctttcagcagtcagtcctctgtaatgcctcacggtgacgatgcacgccatcgaggaagtgggtttcctgtgtatttccttctctggtgtgcttgatcccaggtgctgatagctgctgtgtgtgcgccagtagcgtcaaggaagagaaggtgactctttcacctcctgacagtatagtccagatagcacattgactttttatttttactcattttttattttaaatgtttattttttagagacagaacctcgctctgttgccagggctggagtgcagtggcacaatcatggctcactgcggccttgacctcaatccggggctcaagcgatcctcccacagcctcccgagtaactgggactgcaggcgaataccaccatgcctggctaatttttttttgtttgatttttgtttttttactgtttttggagagacagggtctcgctatgttgcccaggctggtcctgaactcctggcgttaagagatctgccttggcctcccaaagtgctgggattacagatgtgagccactgtgccttgccagccctggaactttgaaaactatgcactggccaaaaaaaaaaaaaaaaaaaaaaaaaaagccgggcgcagtggctcacgcctgtaatcccagcactctgggaggccaaggcgggcggatcacgaggtcaggagtttgagaccagcctggccaatatggtgacaccctgtttctcccaaaaatacaaaaattagccaggcatggtggctcgcgcctgtagtcccagctacttgggaggctgaggcagaagaattgcttgaacccaggatgtggcggttgcagtgagccgagatggtgccactgcactccagcctgggtgacagagggagactccgtgtcaaaaaaaaaaagaaaaaaacgtgcgctgcctgggtgtggtggcttacgcctataatcccagcactttgggaggccaaggtgtgtgaatcattcgaggtcaggagttcgagaccagcctgaccaatatggtgaaatcctgtctctactaaaaatacaaaattagccaggcgtggtggtgcacgcctgtaatcccagccacttgggaggctgaggtgggagaatcgcttgaacccagaaggcagagtttgcagtgagccgagatcgcaccactgcactccagcctgggcaacaagtgtgaagctccgtctc

SEQ ID NO: 1382 - protein, 121 aa, Homo sapien
MPIWVVLLSRIIMKEKQSTKVYLSLIPIISGVLLATVTELSFDMWGLVSALAATLCFSLQNIFSKKVLRDSRIHHLRLLNILGCHAVFFMIPTWVLVDLSAFLVSSDLVSCTAPRTRHFLG

SEQ ID NO: 1383 - DNA, 2072 bp, Homo sapien
ccaagattcggcacgagggactgtactgaacagcaaaaattaagtgacttgctgccctgcacatcatggcactgccattccgtaaggacttagaaaagtacaaagaccttgatgaagatgagctccttgggaatctgtcagaaacagaactgaaacaactggaaactgttttggatgatcttgaccccgagaatgcccttctgcctgcagggttccggcagaagaaccagacatcaaagtccaccacagggccatttgatagagagcatctcctttcatatctggagaaagaagcattggagcataaagacagggaagactatgtgccctacactggagaaaaaaaagggaaaatatttatccccaaacagaaacctgtacagacttttacagaagaaaaagtgtctcttgatccagaattagaagaagctttgacaagtgcttctgatacagaattgtgtgacctcgcagcaattcttgggatgcacaatttgataacgaatacaaagttctgtaatataatgggaagtagtaatggtgttgaccaagaacatttttcaaatgtggtcaaaggtgaaaagattcttccggtatttgatgagccaccaaatccaaccaatgtagaagagagtttgaagagaactaaagaaaacgatgctcatcttgttgaagttaatttgaataatataaagaatatcccaattccaaccctaaaagattttgcaaaggctttggaaaccaacacacatgtgaaatgtttcagtcttgcagccacccggagcaatgaccctgttgctactgcttttgcagaaatgctgaaagtgaacaaaactttgaagagcttaaatgtggagtccaactttatcacgggagttgggattctggcactgattgatgcgttaagagataatgaaaccctggcagagctcaagattgacaatcagaggcagcagttggggacagctgtagaattggaaatggccaagatgcttgaggaaaatacaaatatccttaaatttggatatcagtttacacagcagggaccacgaaccagagcagctaatgctataacaaaaaacaatgacttagtgcgtaagagacgagttgaaggagatcaccagtaagtctgcaaaggtgtaatctttggaagacttcagaagatcaccaagggctcatgttggtgacatcatgtaaaattttcctgggtagaagggaaaagactggaaaaatttttttagtgacatgcattttttttttagttgttatcaaattgtaaaatcagtaatgtgatattttatattctgaaacatttctactttctgctaaaatcaattttaatttagtttaattgaatgatttatgatgaatcttgggcaaaaaaatacaactgtaaaaaatttcacaggtcatttgtgtagaataatttgaacattgtgaggaccaatcttttttaaatcaaaagggatgttgctggtatcagaattgttattgcttcatttagacataaaacacttaagtgttttccttcctccgtgacctggagagttttccattttttaaaatacatgaacttggcaagggtgtgatttttctttatcaagagaacaaaatgccagaatgttaaaacagttaactcaaaatctagtcatctgtgtaggataaagcaggtctccctccccaccccccaaaaaaggcgtacagccaactcttagttatttagggtaagagaaaaaagaaaactgttaaacaatgaaatcaaagataataaatatgatagatttccagtatgaggcactttgcaaaacagtcatttaaactgatggttactgtaagtcagttggaagctggcatgtatgtaaattacttggtgttacaccatatccgaagaagttcctatgtgcagtgcagaattgcataaacagtatttcaatcactgctacaaatcttccaaccaagaaggaaaactgctattcttcataaatctaatttttagtatatgcttcctttcatcttatacttttatcaatatttataaaagtcatttctataataaaagcagtctttcttgctca

SEQ ID NO: 1384 - protein, 352 aa, Homo sapien
MALPFRKDLEKYKDLDEDELLGNLSETELKQLETVLDDLDPENALLPAGFRQKNQTSKSTTGPFDREHLLSYLEKEALEHKDREDYVPYTGEKKGKIFIPKQKPVQTFTEEKVSLDPELEEALTSASDTELCDLAAILGMHNLITNTKFCNIMGSSNGVDQEHFSNVVKGEKILPVFDEPPNPTNVEESLKRTKENDAHLVEVNLNNIKNIPIPTLKDFAKALETNTHVKCFSLAATRSNDPVATAFAEMLKVNKTLKSLNVESNFITGVGILALIDALRDNETLAELKIDNQRQQLGTAVELEMAKMLEENTNILKFGYQFTQQGPRTRAANAITKNNDLVRKRRVEGDHQ

SEQ ID NO: 1385 - DNA, 1784 bp, Homo sapien
ggcttaccacagcctcaacttctcaggctccagccatcctctcacctcagcctcccaagtagctaggactacaggcgtgtgccactgtgcctggcctaattttataattttaaatgtctgtaaagtaagcaaaatgactagttgaattgtacattaaatatatctaatccctaagagtttataatggaaagggatcaaaactttttcaattgcgataaaactcacataacaaaattaaccattttaaagtgaacaatttagtggtatttagtgcattcacagtgtcgtgcagccaacacctgtatctagttccaagacattttcatctccccaaaaggagaccccatacacgtgaagcagtccctctcccatccccctcctcccatccgctagcaactgctaatttgctttttgtctctatggatttacctgttctggatatttcacataaatggaattatacaataaaggaccgtttgtttctaacttctttcactaagcatccatgttatagcatatatcagacttcattcctttatgactgaataatactttgctgaatggatatatcagtgttttatttgtcctttcatcagttggtggacatttgggttctttctaccttttggctattgtgactagtggtgttgcaaacattcatgtacaagtttttgtttgaatgcctgttgtcagttcttctagatttatacttagaagtggaattgctgggtcatatggtaatttctctgtttcaactttttgagagaccacgaaaccgttttccacagtggtggcaccatttgacatgcccactagaaatatatgagagttccattttcttcacatcttctgacagctttttggggtgttgggatgattcgtctaattgggaaaataagtaccttatttgggcctatatggtatttttaattctgtgtgtctgctcccaaactctgtagccctgccctcccttatattgtgtatcctgtttcagattgtttccgtttcttctgagacactgcatatacccctacatgtatctgtgctaggcatacatccctgtaacttcatggcatttttgtaattgctgtgtacctgttacgtatactgagtgggagtgtctcatttgctgtagaactctctgcattagtgtagtgtctggcacacagtagctgctcaggcattttttaagtatatgattattgggaaaactacagagctagggagagatctgaagaaatactagaaatttttttctgcaaagaaaactttagaaaattgttgacatcatctgtggcatgcagcaaaagttgatgtaaaaggaacagaaagacctatggagataatgggatgtaataacagaaaacatacagaaacaattggttctgaaatcagttaagagcagaactggaattcatactctgtggaatgaatcagcaatgtggaaggagtaacaagattttttaaaaagattttgaatttaggctgggtgcagtggctcacgcctgtaaccccatcactttgggaggccagagtaggtggattgcttcaacccaggcattcgagactagcctggacagcatggcaaaaccctatctctacaaaaaataaaaaattagccaggtgtggtggcatgcgcctgtagtcccatctacttgggaggctgaggtggatggatcacctgagcctgggaagtggaggttgcagtaggctgaagtcatgccactgcactcaaacctggcggacagagtgagaccctatctcaaaaaaaaaaaaaaaaaaaa

SEQ ID NO: 1386 - protein, 99 aa, Homo sapien [sequence omitted]

SEQ ID NO: 1387 - DNA, 2229 bp, Homo sapien
ggcacgagggccaggaacgccagccgttcacgcgttcggtcctccttggctgactcaccgccctcgccgccgcaccatggacgcccccaggcaggtggtcaactttgggcctggtcccgccaagctgccgcactcagtgttgttagagatacaaaaggaattattagactacaaaggagttggcattagtgttcttgaaatgagtcacaggtcatcagattttgccaagattattaacaatacagagaatcttgtgcgggaattgctagctgttccagacaactataaggtgatttttctgcaaggaggtgggtgcggccagttcagtgctgtccccttaaacctcattggcttgaaagcaggaaggtgtgcggactatgtggtgacaggagcttggtcagctaaggccgcagaagaagccaagaagtttgggactataaatatcgttcaccctaaacttgggagttatacaaaaattccagatccaagcacctggaacctcaacccagatgcctcctacgtgtattattgcgcaaatgagacggtgcatggtgtggagtttgactttatacccgatgtcaagggagcagtactggtttgtgacatgtcctcaaacttcctgtccaagccagtggatgtttccaagtttggtgtgatttttgctggtgcccagaagaatgttggctctgctggggtcaccgtggtgattgtccgtgatgacctgctggggtttgccctccgagagtgcccctcggtcctggaatacaaggtgcaggctggaaacagctccttgtacaacacgcctccatgtttcagcatctacgtcatgggcttggttctggagtggattaaaaacaatggaggtgccgcggccatggagaagcttagctccatcaaatctcaaacaatttatgagattattgataattctcaaggattctacgtttgtccagtggagccccaaaatagaagcaagatgaatattccattccgcattggcaatgccaaaggagatgatgctttagaaaaaagatttcttgataaagctcttgaactcaatatgttgtccttgaaagggcataggtctgtgggaggcatccgggcctctctgtataatgctgtcacaattgaagacgttcagaagctggccgccttcatgaaaaaatttttggagatgcatcagctatgaacacatcctaaccaggatatactctgttcttgaacaacatacaaagtttaaagtaacttggggatggctacaaaaagttaacacagtatttttctcaaatgaacatgtttattgcagattcttcttttttgaaagaacaacagcaaaacatccacaactctgtaaagctggtgggacctaatgtcaccttaattctgacttgaactggaagcattttaagaaatcttgttgcttttctaacaaattcccgcgtattttgcctttgctgctactttttctagttagatttcaaacttgcctgtggacttaataatgcaagttgcgattaattatttctggagtcatgggaacacacagcacagagggtaggggggccctctaggtgctgaatctacacatctgtggggtctcctgggttcagcggctgttgattcaaggtcaacattgaccattggaggagtggtttaagagtgccaggcgaagggcaaactgtagatcgatctttatgctgttattacaggagaagtgacatactttatatatgtttatattagcaaggtctgtttttaataccatatactttatatttctatacatttatatttctaataatacagttatcactgatatatgtagacacttttagaatttattaaatccttgaccttgtgcattatagcattccattagcaagagttgtaccccctccccagtcttcgccttcctctttttaagctgttttatgaaaaagacctagaagttcttgattcatttttaccattctttccataggtagaagagaaagttgattggttggttgtttttcaattatgccattaaactaaacatttctgttaaattaccctatcctttgttctctactgttttctttgtaatgtatgactacgagagtgatactttgctgaaaagtctttcccctattgtttatctattgtcagtattttatgttgaatatgtaaagaacattaaagtcctaaaacatctaaaaaaaaaaaaaaaaaaaaaaaaaaaaaaaaaaa

SEQ ID NO: 1388 - protein, 370 aa, Homo sapien
MDAPRQVVNFGPGPAKLPHSVLLEIQKELLDYKGVGISVLEMSHRSSDFAKIINNTENLVRELLAVPDNYKVIFLQGGGCGQFSAVPLNLIGLKAGRCADYVVTGAWSAKAAEEAKKFGTINIVHPKLGSYTKIPDPSTWNLNPDASYVYYCANETVHGVEFDFIPDVKGAVLVCDMSSNFLSKPVDVSKFGVIFAGAQKNVGSAGVTVVIVRDDLLGFALRECPSVLEYKVQAGNSSLYNTPPCFSIYVMGLVLEWIKNNGGAAAMEKLSSIKSQTIYEIIDNSQGFYVCPVEPQNRSKMNIPFRIGNAKGDDALEKRFLDKALELNMLSLKGHRSVGGIRASLYNAVTIEDVQKLAAFMKKFLEMHQL

SEQ ID NO: 1389 - DNA, 2418 bp, Homo sapien
gtgcagaaagcaccgtcttttactagaagaagacaataaaatgttggtcaatgaactgaatcattcgaaagaaaaagaatgccaatatgaaaaagagaaagcagaaagagaagtagctgtgagacagcttcaacaaaaacgagatgatgtcttaaacaaaggatcagcaacaaaagctctgctggatgcttcatcgcgtcactgcacctatttagaaaatgggatgcaggattcaaggaagaaattagaccagatgagaagtcaatttcaagaaatacaggatcaacttacagctactataagatgtactaaggagatggatggcgacacacaaaagcttgaagtagaacatgtgatgatgagaaaaattattaaaaaacaggatgaccaaattgagcggcttgagaaaatcctgcagcattcaagtttgatgctgcaggtgtttgagagctagatgaagatatggacatttctggaattaagagccccctctacattgagcacaagacagtgacgaatccacattcttcagccagaaagtcacctctgagagccaaatgtctgactatagaaaggagagtcaaagaatgataacgacatctcaggaaaattgtgaaaataatcagcagccggatgtggataaccctttcaaatttctcctggggcctccaaccacccccactggtgttctcctgctgacagtgatttcaattttttctgggctggagctccctgatggaggggcaggccaccatctttgctgtttttgcaacttagccacttcagccttcagtctttggagtgtccaaggagaccagggggtgatgtggaccctcagcatagcacagctgctctataaagatgaggccagactgcttttttgagcactttcccaatgccattcctcctcactgggcaaaacctccaaactggggtctccagccacctcctacaggtgtgtttgggccagcaacaagttcattcatacctccctagggcaaagcttccaaagggagcggtaggctgccatctttgctgtttcacaggcttcactgatgataactccaggtactggaaaatctgaggctactagagactggagcgggccctgggcatactgcagcagccctatggaaaagtggccagactgttacctgggttcccattcctatatcttctcactaggcaagtcttgcaggcctgggcctctacctaaccccccctaccagaactgttgagccagtagcaactcagccactccctggagagagcctccaggggcaactgaaagcctctctgccactgcttctgcagtggaactgtccttgctaccctcagactgatgaaggagctaacacccttatctacaccttcaacaagctttaattgaccaaagcccatctctcatgggttctacacactccccactgctcatgacagggaacccctggattggcccccacagcacgaattctccatcctgattgctgattgcagtaaacagttgctgtattctccaggggtggtggaactctgaggagacaaacaaaagacccttggctacaaccactactaatgtcccttcctcttctgcctcaaagttaggaaagaaatataaacactgagattgccccagagctgcagtgggcagcctaggagtgccaagccatgacctacagccagcactcaagggggagagaagcacattttcagatcattgagagggaacatggctgcaactgtaaggaaacataggggagccacatgaccaagcaagagtctaccaactgaccagtaagcccaagtgccacctactggatcacatcccaaagcttcagcatcaaaaataccctactaatatactcccctctgaaaccagaaatgagaagtcagcttcaaataaagaccctgcacaaagcctcagcctggtgaaaacatccgaaaataagtctacggactgtactcaatctacactgcaattaaaggaaaacccataggtggaaatgagaagaaaccaatgcaagaactccagtaactcaaatggcctctgtgtcatatgtccttctaacaaccacaccagttctccaacaagagttcttaacctggatgaactgtctggaattacataaatataattcagaatatggataggaaaaaaaatcatcaagactcaggagaatggcaaaacccaatccaaggaaaataagaataacagtaaagtgttacaggagctgaaggataaagtagctggtataataaaaaagaacctaaccgatctgaaagcgccgaagaacacaatacaagaattccacaatgcaatcacaagtattaacagcagaaaaaaaaacctgaggaacgaatctcagaacttgaagattggttctctaaaataagatggacaaaaaaaaaaaaaaaaaa

SEQ ID NO: 1390 - protein, 137 aa, Homo sapien [sequence omitted]

SEQ ID NO: 1391 - DNA, 1041 bp, Homo sapien
gcccccgagcaggagccggtgcgagcggagcagagccgaggtcgggccgcgagcggagccggctgagcgggcgccgagctcccgccatggcccggaacacgctgtcctcgcgcttccgccgggtggacatcgacgaatttgacgagaacaaatttgtggacgagcaggaggaggcggcggcggcggcggcggagccaggcccggacccgagcgaggtggacgggctcctgcggcaaggggacatgcttcgggcattccatgcagccttgcggaactctcccgtcaacaccaagaatcaagctgtgaaggagcgagcccagggcgtggtgctgaaagtgctcacaaacttcaagagcagtgagattgagcaggctgtgcagtcactggacagaaacggcgttgacttgttaatgaagtacatttataaaggctttgagaagcccacagaaaatagcagcgcagtgttactccagtggcacgaaaaggccttagcagtaggaggactaggctccattataagagttcttacagcaagaaagactgtttaaaaaaaataaaaagactcatgttaccttgagaagaattctggatgcccaggctggtgaagaagggattgacaatggaccatcttcctaggaactcccaagtaaactatttcaggacatgtatctgctgaaatgtattttattttcaaggtggaggggaaaatcgtctgtttcctaaatcctgtttaggatctgatagtctatgcctttgtctccgagtactgcagaactgacattttgacggtctaccagcgtggcggctggtgttggtcagatgcacctgtgtgcactgggggagggatggtttgggcaggtgcagatccaagggctgtggtaaacgggagagcttgtgtttttgaagtggaaaaaaacccaagagtttgtacagacatcctgtcttcccagagaaggtggacactcttgggctcattgtaaagtgcctgctgcatcaataaagctcttggcttattagtctatacaaaaaaaaaaaaaaaaa

SEQ ID NO: 1392 - protein, 153 aa, Homo sapien
MARNTLSSRFRRVDIDEFDENKFVDEQEEAAAAAAEPGPDPSEVDGLLRQGDMLRAFHAALRNSPVNTKNQAVKERAQGVVLKVLTNFKSSEIEQAVQSLDRNGVDLLMKYIYKGFEKPTENSSAVLLQWHEKALAVGGLGSIIRVLTARKTV

SEQ ID NO: 1393 - DNA, 1843 bp, Homo sapien
ataaaaaccgtcctcgggcgcggcggggagaagccgagctgagcggatcctcacacgactgtgatccgattctttccagcggcttctgcaaccaagcgggtcttacccccggtcctccgcgtctccagtcctcgcacctggaaccccaacgtccccgagagtccccgaatccccgctcccaggctacctaagaggatgagcggtgctccgacggccggggcagccctgatgctctgcgccgccaccgccgtgctactgagcgctcagggcggacccgtgcagtccaagtcgccgcgctttgcgtcctgggacgagatgaatgtcctggcgcacggactcctgcagctcggccaggggctgcgcgaacacgcggagcgcacccgcagtcagctgagcgcgctggagcggcgcctgagcgcgtgcgggtccgcctgtcagggaaccgaggggtccaccgacctcccgttagcccctgagagccgggtggaccctgaggtccttcacagcctgcagacacaactcaaggctcagaacagcaggatccagcaactcttccacaaggtggcccagcagcagcggcacctggagaagcagcacctgcgaattcagcatctgcaaagccagtttggcctcctggaccacaagcacctagaccatgaggtggccaagcctgcccgaagaaagaggctgcccgagatggcccagccagttgacccggctcacaatgtcagccgcctgcaccggctgcccagggattgccaggagctgttccaggttggggagaggcagagtggactatttgaaatccagcctcaggggtctccgccatttttggtgaactgcaagatgacctcagatggaggctggacagtaattcagaggcgccacgatggctcagtggacttcaaccggccctgggaagcctacaaggcggggtttggggatccccacggcgagttctggctgggtctggagaaggtgcatagcatcacgggggaccgcaacagccgcctggccgtgcagctgcgggactgggatggcaacgccgagttgctgcagttctccgtgcacctgggtggcgaggacacggcctatagcctgcagctcactgcacccgtggccggccagctgggcgccaccaccgtcccacccagcggcctctccgtacccttctccacttgggaccaggatcacgacctccgcagggacaagaactgcgccaagagcctctctggaggctggtggtttggcacctgcagccattccaacctcaacggccagtacttccgctccatcccacagcagcggcagaagcttaagaagggaatcttctggaagacctggcggggccgctactacccgctgcaggccaccaccatgttgatccagcccatggcagcagaggcagcctcctagcgtcctggctgggcctggtcccaggcccacgaaagacggtgactcttggctctgcccgaggatgtggccaagaccacgactggagaagccccctttctgagtgcaggggggctgcatgcgttgcctcctgagatcgaggctgcaggatatgctcagactctagaggcgtggaccaaggggcatggagcttcactccttgctggccagggagttggggactcagagggaccacttggggccagccagactggcctcaatggcggactcagtcacattgactgacggggaccagggcttgtgtgggtcgagagcgccctcatggtgctggtgctgttgtgtgtaggtcccctggggacacaagcaggcgccaatggtatctgggcggagctcacagagttcttggaataaaagcaacctcagaacactt

SEQ ID NO: 1394 - protein, 406 aa, Homo sapien
MSGAPTAGAALMLCAATAVLLSAQGGPVQSKSPRFASWDEMNVLAHGLLQLGQGLREHAERTRSQLSALERRLSACGSACQGTEGSTDLPLAPESRVDPEVLHSLQTQLKAQNSRIQQLFHKVAQQQRHLEKQHLRIQHLQSQFGLLDHKHLDHEVAKPARRKRLPEMAQPVDPAHNVSRLHRLPRDCQELFQVGERQSGLFEIQPQGSPPFLVNCKMTSDGGWTVIQRRHDGSVDFNRPWEAYKAGFGDPHGEFWLGLEKVHSITGDRNSRLAVQLRDWDGNAELLQFSVHLGGEDTAYSLQLTAPVAGQLGATTVPPSGLSVPFSTWDQDHDLRRDKNCAKSLSGGWWFGTCSHSNLNGQYFRSIPQQRQKLKKGIFWKTWRGRYYPLQATTMLIQPMAAEAAS

SEQ ID NO: 1395 - DNA, 2853 bp, Homo sapien
gtcgacgagagagagagagagagagaactagtctcggggggccaaagggaaagaagaagaacggaaggaacagagggggcaaagccaacaaccccccgtatttgccccccgaggctgaagatggaaacattgaatataaattgaagctggtgaatccatcccagtaccgctttgagcacctggtgacacaaatgaagtggcggctccaggagggacgtggtgaggccgtctaccagattggggtagaggacaatgggctgctggtggggctggctgaggaggaaatgcgagcttcgctcaagaccctgcaccggatggcagagaaggttggggcagacataaccgttcttcgagagcgagaagtggattatgatagcgacatgccccggaagatcaccgaggtgctagtacgaaaggtccctgacaaccaacagttcctagacctccgtgtggccgtcctggggaatgtggactctgggaagtcaactctgcttggagtcctgacccagggagagctggacaatgggcggggccgggctcggctcaaccttttccgccacctgcatgagattcagtctggccgaacctccagcatcagcttcgagatcctgggctttaacagcaaggaagaggtggtgaattacagcgactcacggacagcagaagagatctgtgagagcagctccaagatgatcaccttcatcgacctggcaggccaccataagtacctacacaccaccatctttggcctcacatcatactgccccgactgcgccctgctcctcgtcagtgccaacactgggattgctggcaccacaagggaacatctggggctggccctggccctgaaagtgcccttcttcatcgtggtcagcaagatcgacctatgtgccaagaccacagtggagaggacagtacgccagctggagcgggtcctcaagcagcctggctgccacaaggtccccatgctggtcacctctgaggatgatgccgtcactgctgcccagcagtttgctcagtcacccaatgtcacccccatcttcacattgtccagtgtgtctggagagagtctggacctcctcaaagtctttctgaatattctgccaccactcaccaacagcaaagagcaggaggaactcatgcagcagctgacggagttccaggtggatgaaatctacacagtaccagaggtggggactgttgttggaggaacactttccagtgggatttgccgtgagggggaccagctggtggtgggccccacggatgatggctgcttcctggagctgagagtatgcagcatccagcgcaaccgctctgcctgtcgtgtgctgcgagctggtcaggctgctacactggcgcttggggactttgaccgtgcactgcttcgcaagggcatggtgatggtgagcccggagatgaatcctaccatctgctcggtgtttgaggcagagatagtcttactgttccatgccaccaccttccgacgaggattccaggtgacagtacacgtgggcaacgtacgtcagacggcagtggtggaaaagatccatgccaaggacaaactgcggacaggcgaaaaggcagtggtacgtttccgcttcctgaaacacccagagtacctgaaggtgggcgccaaactgctgttccgggagggtgtcaccaagggcatcggccatgtcactgatgtacaagccattacagcaggagaagcccaggccaacatgggcttctgaacccttcaggcagggacagttctattgctgtccctacaatatataaggtgacttctggccatgctgccctgccattggcggctctgtgtgttaataggctagggagagaggggtgctgtctgccacttgctccctgccaactttctggagaggtgccaaacttggtgtggccaggaaagggcagtcctgagggagaagacaggattcagggcagtgctccgaagctgtgtgctcacctggttggctcatcaaacctggcaaccctgtggcctgtctgccggagctgactggatccactcatcaattcttcgtccccactactaagactgggcatgttttgctggtgtggtctctgcacttcaggaatggtcacaacagggggtagccctcaaaagcactcctttttctatacctcttctcaaggccatgtaagttgcccatctctacctggctgtggacaaaaggttatctgctcttggccatctggtggtggtggcggcccagagtctgaagaaatggcacagggacagtgaatggtagtgttgccaccctgtgctgaggcctgaggcctcttcctcagctttatctccctttccttcactcaagggccatttccccagtccctatctcccccatcccctcccggcttataggccccacaggtgctatttgttgtgctggcccaggcgtggggctaccaagcaaaggcttggcatataccaaaggccagctgcatgcccatcagtctggtctttttcctctgcggtcatgttggctttcatgctggatcaaatgttttactttcccagactggtggcatctgagttccccatcctaccactctcaccccactttcctgcccacctaaaccctcgttttagtaatttgtagtgactgttcccttccctctgttgcagggaaccaggaggaaagggaaagatgttgccatatttcctactctttaggcatggactctcctttccctttgttagtgtcctgggttcccatggactcagggatttgttggctaaggtttctctgtgcatatatatatatatacatatgtatatatatttaaatacacatatatattgtacagaataaaaatgttttattg

SEQ ID NO: 1396 - protein, 514 aa, Homo sapien
MKWRLQEGRGEAVYQIGVEDNGLLVGLAEEEMRASLKTLHRMAEKVGADITVLREREVDYDSDMPRKITEVLVRKVPDNQQFLDLRVAVLGNVDSGKSTLLGVLTQGELDNGRGRARLNLFRHLHEIQSGRTSSISFEILGFNSKEEVVNYSDSRTAEEICESSSKMITFIDLAGHHKYLHTTIFGLTSYCPDCALLLVSANTGIAGTTREHLGLALALKVPFFIVVSKIDLCAKTTVERTVRQLERVLKQPGCHKVPMLVTSEDDAVTAAQQFAQSPNVTPIFTLSSVSGESLDLLKVFLNILPPLTNSKEQEELMQQLTEFQVDEIYTVPEVGTVVGGTLSSGICREGDQLVVGPTDDGCFLELRVCSIQRNRSACRVLRAGQAATLALGDFDRALLRKGMVMVSPEMNPTICSVFEAEIVLLFHATTFRRGFQVTVHVGNVRQTAVVEKIHAKDKLRTGEKAVVRFRFLKHPEYLKVGAKLLFREGVTKGIGHVTDVQAITAGEAQANMGF

SEQ ID NO: 1397 - DNA, 2068 bp, Homo sapien
ctgcacagggagtttgtcttgtgcaaacaatttccaaggcagcgttttcttccctgcctgggagtgcagggctcagcgccttcactttggaactgactcagagacctaaagaagcccacctggccagcgggaaggggggccgccgccgcctcccggttttgggcagccctggccagctccctgtggccttggaggacttccaccgggcaggcgttcccatgatgccaggctaccaggcgcgggggattcctgcaggccggcgctgcttttcttagaaccccctttctagaaaagtacacctggaggttttgcttcaaagagaggagaggcagcagcatggcgagtgtcctgtcccgacgccttggaaagcggtccctcctgggagcccgggtgttgggacccagtgcctcggaggggccctcggctgccccaccctcggagccactgctagaaggggccgctccccagcctttcaccacctctgatgacaccccctgccaggagcagcccaaggaagtccttaaggctcccagcacctcgggccttcagcaggtggcctttcagcctgggcagaaggtttatgtgtggtacgggggtcaagagtgcacaggactggtggagcagcacagctggatggagggtcaggtgaccgtctggctgctggagcagaagctgcaggtctgctgcagggtggaggaggtgtggctggcagagctgcagggcccctgtccccaggcaccacccctggagcccggagcccaggccctggcctacaggcccgtctccaggaacatcgatgtcccaaagaggaagtcggacgcagtggaaatggatgagatgatggcggccatggtgctgacgtccctgtcctgcagccctgttgtacagagtcctcccgggaccgaggccaacttctctgcttcccgtgcggcctgcgacccatggaaggagagtggtgacatctcggacagcggcagcagcactaccagcggtcactggagtgggagcagtggtgtctccaccccctcgcccccccacccccaggccagccccaagtatttgggggatgcttttggttctccccaaactgatcatggctttgagaccgatcctgaccctttcctgctggacgaaccagctccacgaaaaagaaagaactctgtgaaggtgatgtacaagtgcctgtggccaaactgtggcaaagttctgcgctccattgtgggcatcaaacgacacgtcaaagccctccatctgggggacacagtggactctgatcagttcaagcgggaggaggatttctactacacagaggtgcagctgaaggaggaatctgctgctgctgctgctgctgctgccgcaggcaccccagtccctgggactcccacctccgagccagctcccacccccagcatgactggcctgcctctgtctgctcttccaccacctctgcacaaagcccagtcctccggcccagaacatcctggcccggagtcctccctgccctcaggggctctcagcaagtcagctcctgggtccttctggcacattcaggcagatcatgcataccaggctctgccatccttccagatcccagtctcaccacacatctacaccagtgtcagctgggctgctgccccctccgccgcctgctctctctctccggtccggagccggtcgctaagcttcagcgagccccagcagccagcacctgcgatgaaatctcatctgatcgtcacttctccaccccgggcccagagtggtgccaggaaagcccgaggggaggctaagaagtgccgcaaggtgtatggcatcgagcaccgggaccagtggtgcacggcgtgccggtggaagaaggcctgccagcgctttctggactgagctgtgctgcaggttctactctgttcctggccctgccggcagccactgacaagaggccagtgtgtcaccagccctcagcagaaaccgaaagagaaagaacggaaacacggagtttgggctctgttggctaaggtgtaacacttaaagcaattttctcccattgtgcgaacattttattttttaaaaaaaa

SEQ ID NO: 1398 - protein, 513 aa, Homo sapien
MASVLSRRLGKRSLLGARVLGPSASEGPSAAPPSEPLLEGAAPQPFTTSDDTPCQEQPKEVLKAPSTSGLQQVAFQPGQKVYVWYGGQECTGLVEQHSWMEGQVTVWLLEQKLQVCCRVEEVWLAELQGPCPQAPPLEPGAQALAYRPVSRNIDVPKRKSDAVEMDEMMAAMVLTSLSCSPVVQSPPGTEANFSASRAACDPWKESGDISDSGSSTTSGHWSGSSGVSTPSPPHPQASPKYLGDAFGSPQTDHGFETDPDPFLLDEPAPRKRKNSVKVMYKCLWPNCGKVLRSIVGIKRHVKALHLGDTVDSDQFKREEDFYYTEVQLKEESAAAAAAAAAGTPVPGTPTSEPAPTPSMTGLPLSALPPPLHKAQSSGPEHPGPESSLPSGALSKSAPGSFWHIQADHAYQALPSFQIPVSPHIYTSVSWAAAPSAACSLSPVRSRSLSFSEPQQPAPAMKSHLIVTSPPRAQSGARKARGEAKKCRKVYGIEHRDQWCTACRWKKACQRFLD

SEQ ID NO: 1399 - DNA, 2095 bp, Homo sapien
ggatgaaagtgatttaattcatttttagaattttttttttgttttgttttagcaacatgctgaacaactaatttactttaaaaataagccagttaaaacaaaggacgctaagcccaagtggggggcaatattagtcaggatctttggggtctaattccagaccaactttcagaagcacttctttgtctctgttctcacctctgctgtccctctcttccctcatcccctaagagagacaaagataaaagcccacctgcatccctaagtcttactgagatcagccaccccaggggagagaaactggatctacttacagccaccccctgtttccatccatatacttacttcccccaatttgcatgtgattatggaaacaagtcatgctcatgaaagcaactgtaaaataaaaggttatggagtagttcagcaacttcttcacagccagctttgtggagctggggaggacttagggcccattggagtctcttatgtgtacagcttcagggctgtccctttcagtttgattttaagcaatgcctcacttcatagcttagggggtaaggattccattcaggtaggttgtctaaaggaactaatgggacctctcagtgaattagctgaccagattttaggaaatctttttaatttctatgattttccttctcacattttgaaatggtaaaattgactggaaataatttttcttggtgccttattggttttccttgcaaacctttctcatattttctcatgaccattgccagtgaccaaggcccatgtgtgtgttgtgtgtaattgtgggcatgtacaagcttaaataacgtgccgacagcactgtttcaaagttggtattcattaggctgttgcctcctgggctggagctgcgctaatcctgacaccggctgccaggagaaaacctcatggatcacacaccaaaccttaataacagcatccgtgacctgcactctccagtacagaatgggaaccccagagctaggaaatgtagttgtatattttaatgaactgctaccccagccaaagaagcttctttcacttttgtgctctacagaaagcccaaggggggtaggagggacagagctttgaataactgctttctaacactaaatgtggccaacaggacagagcacatcacacgtataggcaggtgtgagggacagtggctaagaattgcctgctccctctgcatgctctttcttgtttccaaagtccaatcaagtgatcctgggaaacaaatctgtctggattgcggagggtggttctgaaagaactgccaagacgttaaagaagggtgaagagtaggcagaatataagtagctaacctgagtcaagactctcaaaagctagcagcctgatgacaataggatttatttcagccaggatagtgtctgtctgtgagtgcatcattttaagacagtatgacttcatgttgttacaaactatgtatagtatgtatgttttgtgggttgtatatatacataatatatattatatatatatatgagagatttggtgacttttgatacgggtttggtgcaggtgaatttattactgagccaaatgaggcacataccgagtcagtagttgaagtccagggcattcgatactgtttatgatttccatatatgtatagtgcctatcccatgctgtagtcactgttatgttaaatccagaagttacactagagccagcgatactttatttgtagacaatcaatttgaatccatatgttattactggcagatgatacatgattacagttctgaatctgtaacacttacaaaaggaaacccagagcagcttgatgagtttttgtttctgcttcgttcctgggagtcagtagaaacagcagttgtatgtggttatgttagtctcaagatacttaatttgttgaccttacttcagaaaaattttgtatgtattatatttgtgggaaggtaaaataatcatttgagatttttatcaaatatgaagattagttatttatgaaaaacaaagaaatgtctatttttctttgttcccaattaatgtagataaattttaaaatgcattaaagtaatggtccggaaaaaaaaaa

SEQ ID NO: 1400 - protein, 104 aa, Homo sapien
METSHAHESNCKIKGYGVVQQLLHSQLCGAGEDLGPIGVSYVYSFRAVPFSLILSNASLHSLGGKDSIQVGCLKELMGPLSELADQILGNLFNFYDFPSHILKW

SEQ ID NO: 1401 - DNA, 1138 bp, Homo sapien
gcacgaggtgttctatttacatggcctgtgtaaatctccattgggaagtcatgccttctaaaaagattcttatttgggggagtgggcaaaatgttgattattttctaatgctttgtagcaaagcatatcaattgaaaagggaatatcagcaccttcctagtttgggatttgaaaagtggaattaattgcagtagggataaagtagaagaaaccacaaattatcttgtgcctgaaatccattaagaggcctgatagctttaagaattagggtgggttgtctgtctggaagtgttaagtggaatgggctttgtcctccaggaggtgggggaatgtggtaacattgaatacagttgaataaaatcgcttacaaaactcacactctcacaatgcattgttaagtatgtaaaagcaataacattgattctctgttgtacttttttgtaactaattctgtgagagttgagctcattttctagttggaagaatgtgatatttgttgtgttggtagtttacctaatgcccttacctaattagattatgataaataggtttgtcattttgcaagttacatgttttaaacatttatcaatgaagtcatcctttagacttgtaatcgccacattgtttcattattcagtttcctctgtaaagggatcttgagttgttttaatttttttttctgcatctgaatctgcatgatttccaaaccctgtaccatctgaattttgcattttagcacttgcactattactcagcagcagtaacatggtaacacttaaaatggtactcggggacctccaaagactaaactgacaagccttcaaggagcccaggggtaagttaacttgtcaacggcatggtttaatcccttctttacacttgtgtaaatttcagttactggtcatagaaggctttcaatgttgagtggccttttattaacatgtttatggtactgcatagatacgggtatttattttaccctaagaagattttgaagtttaaaagtacttaaactatttggcaaagatttgtttttaaaaatctatttggtcaatctaaatgcattcattctaaaaaattttttgaaccagataaataaaatttttttttgacaccacaaaaaaaaaaaaaaaaaaaa

SEQ ID NO: 1402 - protein, 54 aa, Homo sapien
MACVNLHWEVMPSKKILIWGSGQNVDYFLMLCSKAYQLKREYQHLPSLGFEKWN

SEQ ID NO: 1403 - DNA, 660 bp, Homo sapien
atggaggccgcccgggactatgcaggagccctcatcaggcccctgacatttatgggatcacagactaagcgagtcctgttcaccccgctcatgcatccagctcgccctttccgggtctccaaccatgacaggagcagccggcgtggggtgatggcaagcagcctgcaggagctcatcagcaagactctggatgccctcgtcatcgctaccggactggtcactctggtgctggaggaagatggcaccgtggtggacacagaagagttctttcagaccttgggagacaacacgcatttcatgatcttggaaaaaggacagaagtggatgccgggcagccagcacgtccccacttgctcgccgccgaagaggtcgggaatagcgagagtcaccttcgacttgtacaggctgaaccccaaggacttcatcggctgccttaacgtgaaggccaccatgtatgagatgtactccgtgtcctacgacatccggtgcacgggactcaagggcctgctgaggagtctgctgcggttcctgtcctactccgcccaggtgacgggacagtttctcatctatctgggcacatacatgctccgggtgctggatgacaaggaagagcggccatccctccggtcacaagccaagggcaggttcacgtgtggatag

SEQ ID NO: 1404 - protein, 219 aa, Homo sapien
MEAARDYAGALIRPLTFMGSQTKRVLFTPLMHPARPFRVSNHDRSSRRGVMASSLQELISKTLDALVIATGLVTLVLEEDGTVVDTEEFFQTLGDNTHFMILEKGQKWMPGSQHVPTCSPPKRSGIARVTFDLYRLNPKDFIGCLNVKATMYEMYSVSYDIRCTGLKGLLRSLLRFLSYSAQVTGQFLIYLGTYMLRVLDDKEERPSLRSQAKGRFTCG

SEQ ID NO: 1405 - DNA, 793 bp, Homo sapien
acgaggcttcattccattttctgttgagtaataaactcaacgttgaaaatgtcctttgtgggggagaactcaggagtgaaaatgggctctgaggactgggaaaaagatgaaccccagtgctgcttagaagacccggctggaagccccctggaaccaggcccaagcctccccaccatgaattttgttcacacaagtccaaaggtgaagaacttaaacccgaagaaattcagcattcatgaccaggatcacaaagtactggtcctggactctgggaatctcatagcagttccagataaaaactacatacgcccagagatcttctttgcattagcctcatccttgagctcagcctctgcggagaaaggaagtccgattctcctgggggtctctaaaggggagttttgtctctactgtgacaaggataaaggacaaagtcatccatcccttcagctgaagaaggagaaactgatgaagctggctgcccaaaaggaatcagcacgccggcccttcatcttttatagggctcaggtgggctcctggaacatgctggagtcggcggctcaccccggatggttcatctgcacctcctgcaattgtaatgagcctgttggggtgacagataaatttgagaacaggaaacacattgaattttcatttcaaccagtttgcaaagctgaaatgagccccagtgaggtcagcgattaggaaactgccccattgaacgccttcctcgctaatttgaactaattgtataaaaacaccaaacctgctcactaaaaaaaaaaaaaaaaaa

SEQ ID NO: 1406 - protein, 218 aa, Homo sapien
MSFVGENSGVKMGSEDWEKDEPQCCLEDPAGSPLEPGPSLPTMNFVHTSPKVKNLNPKKFSIHDQDHKVLVLDSGNLIAVPDKNYIRPEIFFALASSLSSASAEKGSPILLGVSKGEFCLYCDKDKGQSHPSLQLKKEKLMKLAAQKESARRPFIFYRAQVGSWNMLESAAHPGWFICTSCNCNEPVGVTDKFENRKHIEFSFQPVCKAEMSPSEVSD

SEQ ID NO: 1407 - DNA, 3641 bp, Homo sapien
ctgcactgaagagggagagcgagagagagactggagacgcacagatccccccaaggtctcccaagcctaccgtcccacagattattgtacagagccccaaaaatcgaaacagaggaaacgaacagcagttgaacatggacgaaggaattcctcatttgcaagagagacagttactggaacatagagattttataggactggactattcctctttgtatatgtgtaaacccaaaaggagcatgaaacgagacgacaccaaggatacctacaaattaccgcacagattaatagaaaagaaaagaagagaccgaattaatgaatgcattgctcagctgaaagatttactgcctgaacatctgaaattgacaactctgggacatctggagaaagctgtagtcttggaattaactttgaaacacttaaaagctttaaccgccttaaccgagcaacagcatcagaagataattgctttacagaatggggagcgatctctgaaatcgcccattcagtccgacttggatgcgttccactcgggatttcaaacatgcgccaaagaagtcttgcaatacctctcccggtttgagagctggacacccagggagccgcggtgtgtccagctgatcaaccacttgcacgccgtggccacccagttcttgcccaccccgcagctgttgactcaacaggtccctctgagcaaaggcaccggcgctccctcggccgccgggtccgcggccgccccctgcctggagcgcgcggggcagaagctggagcccctcgcctactgcgtgcccgtcatccagcggactcagcccagcgccgagctcgccgccgagaacgacacggacaccgacagcggctacggcggcgaagccgaggcccggccggaccgcgagaaaggcaaaggcgcgggggcgagccgcgtcaccatcaagcaggagcctcccggggaggactcgccggcgcccaagaggatgaagctggattcccgcggcggcggcagcggcggcggcccggggggcggcgcggcggcggcggcagccgcgcttctggggcccgaccctgccgccgcggccgcgctgctgagacccgacgccgccctgctcagctcgctggtggcgttcggcggaggcggaggcgcgcccttcccgcagcccgcggccgccgcggcccccttctgcctgcccttctgcttcctctcgccttctgcagctgccgcctacgtgcagcccttcctggacaagagcggcctggagaagtatctgtacccggcggcggctgccgccccgttcccgctgctataccccggcatccccgccccggcggcagccgcggcagccgccgccgccgctgccgccgccgccgccgcgttcccctgcctgtcctcggtgttgtcgccccctcccgagaaggcgggcgccgccgccgcgaccctcctgccgcacgaggtggcgccccttggggcgccgcacccccagcacccgcacggccgcacccacctgcccttcgccgggccccgcgagccggggaacccggagagctctgctcaggaagatccctcgcagccaggaaaggaagctccctgaatccttgcgtcccgaaggacggaggttcaagcagagtgagaagttaaaatacccttaaggaggttcaagcagagtgagaagttaaaatacccttaaggtctttaagggaggaagtgtaatagatgcacgacaggcataaacaagaacaacaaaacaggtgttatgtgtacattcggagttcctgttttgctcatcccgcaccaccccaccctccacacactaacatccctttcttccccccaccagctgtaaaagatcctatgcgaaagacactggctcttttttttaatcccccaaataaattttgcccccttttaggccatgttccattatctcttaaaattggaacctaattcgagaggaagtaagaagggtctgttctgtggctgagctaggtgaaccccggggtaggggaaagatgttaacacctttgacgtctttggagttgacatggaacagcaggtagttgttatgtagagctagttctcaaagctgccctgcctgttttaggaggcgttccacaaacagattgaggctctttttagaattgaatttactcttcagtattttctaatgttcagctttctaaaaggcatatatttttcaaagaagtgaggatgcagtttctcacgttgcaacctattctgaagtggtttaaatggtatctcttagtaacttgcactcgttaaagaaacacggagctgggccatcgtcagaactaagtcagggaaggagatggatgagaaggccagaatcattcctagtacatttgctaacactttattgagaaattgaccatgaattaatggactcatcttaatttcttctaagtccatatatagatagatatctatctgtacagatttctatttatccatagataggtatctatacatacacatctcaagtgcatctattcccactctcattaatccatcatgttcctaaatttttgtaatcttactgtaaaaaaaagtgcactgaacttcaaaacaaaacaaaaaacaacaacaacaaaaaacaagtccaaactgatatatcctatattctgttaaaattcaaaagtgaacgaaagcatttaactggccagttttgattgcaaatgctgtaaagatatagaatgaagtcctgtgaggccttcctatctccaagtctatgtattttctggagaccaaaccagataccagataatcacaaagaaagcttttttaataaggcttaaaccaagaccttgtctagatatttttagtttgttgccaaggtagcactgtgagaaatctcacttggatgttatgtaaggggtgagacacaacagtctgactatgagtgaggaaaatatctgggtcttttcgtcagtttggtgcatttgctgctgctgttgctactgtttgcctcaaacgctgtgtttaaacaacgttaaactcttagcctacaaggtggctcttatgtacatagttgttaatacatccaattaatgatgtctgacatgctatttttgtagggagaaaatatgtgctaatgatattttgagttaaaatatcttttggggaggatttgctgaaaagttgcacttttgttacaatgcttatgcttggtacaagcttatgctgtcttaaattattttaaaaaaattaaatactgtctgtgagaaaccagctggtttagaaaagtttagtatgtgacgataaactagaaattacctttatattctagtattttcagcactccataaattctattacctaaatattgccacactattttgtgatttaaaaattcttactaaggaataaaaactttaatatacgatatgatattgtctaataattaaaaaagacataatggatgctcaattagttttaagatatctataactatagggatacaaatcactacagttctcagatttacaccttttttttgtcattggcttgatgtcacacatttccaatctcttgcaagcctccaggctctggctttgtctacctgctcgttcccaatgtatcttaatgaaaagtgcaaaagaaaaacctaccaattaaaaaaaaaaaaaaaaaa

SEQ ID NO: 1408 - protein, 482 aa, Homo sapien
MDEGIPHLQERQLLEHRDFIGLDYSSLYMCKPKRSMKRDDTKDTYKLPHRLIEKKRRDRINECIAQLKDLLPEHLKLTTLGHLEKAVVLELTLKHLKALTALTEQQHQKIIALQNGERSLKSPIQSDLDAFHSGFQTCAKEVLQYLSRFESWTPREPRCVQLINHLHAVATQFLPTPQLLTQQVPLSKGTGAPSAAGSAAAPCLERAGQKLEPLAYCVPVIQRTQPSAELAAENDTDTDSGYGGEAEARPDREKGKGAGASRVTIKQEPPGEDSPAPKRMKLDSRGGGSGGGPGGGAAAAAAALLGPDPAAAAALLRPDAALLSSLVAFGGGGGAPFPQPAAAAAPFCLPFCFLSPSAAAAYVQPFLDKSGLEKYLYPAAAAAPFPLLYPGIPAPAAAAAAAAAAAAAAAAFPCLSSVLSPPPEKAGAAAATLLPHEVAPLGAPHPQHPHGRTHLPFAGPREPGNPESSAQEDPSQPGKEAP

SEQ ID NO: 1409 - DNA, 1960 bp, Homo sapien
ggtgagtccgcgtgtggaagtctgtgaggcgcagaggtggggcaggccgtctggctagctaggcggctgggagcgttttcgtggcggggaacggaggttgaattgccctgcctgggctcatagggaaggaggatgtgaaggagcttgtgaaggcagaggaagattattgaataataaaatacagttttgaaaaaaatggatgaagaacctgaaagaactaagcgatgggaaggaggctatgaaagaacatgggagattcttaaagaagatgaatctggatcacttaaagctacaatagaagacattctattcaaggcaaagagaaaaagagtatttgagcaccatggacaagttcgacttggaatgatgcgccacctttatgtggtagtagatggatcaagaacaatggaagaccaagatttaaagcctaatagactgacgtgtactttaaagttgttggaatactttgtagaggaatattttgatcaaaatcctattagtcagattggaataattgtaactaagagtaaaagagctgaaaaattgactgaactttcaggaaacccaagaaaacatataacgtctttgaagaaagctgtggatatgacctgccatggagagccatctctttataattccctaagcatagctatgcagactctaaaacacatgcctggacatacaagtcgagaagtactaatcatctttagcagccttacaacttgcgatccatctaatatttatgatctaatcaagaccctaaaggcagctaaaattagagtatctgttattggattgtctgcagaagttcgcgtttgcactgtacttgctcgtgaaactggtggcacgtaccatgttattttagatgaaagccattacaaagagttgctcacacatcatgttagtcctcctcctgctagctcaagttctgaatgctcacttattcgtatgggatttcctcagcacaccattgcttctttatctgaccaggatgcaaaaccctctttcagcatggcgcatttggatggcaatactgagccagggcttacattaggaggctatttctgcccacagtgtcgggcaaagtactgtgagctacctgttgaatgtaaaatctgtggtcttactttggtgtctgctccccacttggcacggtcttaccatcatttgtttcctttggatgcttttcaagaaattcccctagaagaatataatggagaaagattttgttatggatgtcagggggaattgaaagaccaacatgtttatgtttgtgctgtgtgccaaaatgttttctgtgtggactgtgatgtttttgttcatgattctctacactgttgccctggctgtattcataagattccagctccttcaggtgtttgattccagcatgtagtatacattgtatgtgttaaaaagaaatttgcaactgtgaataaaaggacttctttagaagaagcttcatttaaaacatgaaaggataatctgacttaagaaactttttgctaagaaaaggtaatattttattaaattttaaatttgtgttgtcacagaaatacctgaaattcagtagtacttcattcaattaattttgttttctattattttgagttatactgttttcaaagtcattatgcagtatgtataaacttataagaattaaattgatgtgataattttatgtttttataattaaatatagaatctttatgatttatgttaattcattaatttagtgtaagaagaaagttaagtctgaatgtaaattcagtgtaagatgaaaatttatcaatacttatggaaattaggctgggcgctgtggctcacgcctgtaatcccagcactttgggaggctgaggtgggcggatcacttgaggtcaggagttcgagaccagccgggccagcatggtggaaaccccgttcactactaaaaatacaaggattattagccgggcctggt

SEQ ID NO: 1410 - protein, 395 aa, Homo sapien
MDEEPERTKRWEGGYERTWEILKEDESGSLKATIEDILFKAKRKRVFEHHGQVRLGMMRHLYVVVDGSRTMEDQDLKPNRLTCTLKLLEYFVEEYFDQNPISQIGIIVTKSKRAEKLTELSGNPRKHITSLKKAVDMTCHGEPSLYNSLSIAMQTLKHMPGHTSREVLIIFSSLTTCDPSNIYDLIKTLKAAKIRVSVIGLSAEVRVCTVLARETGGTYHVILDESHYKELLTHHVSPPPASSSSECSLIRMGFPQHTIASLSDQDAKPSFSMAHLDGNTEPGLTLGGYFCPQCRAKYCELPVECKICGLTLVSAPHLARSYHHLFPLDAFQEIPLEEYNGERFCYGCQGELKDQHVYVCAVCQNVFCVDCDVFVHDSLHCCPGCIHKIPAPSGV

SEQ ID NO: 1411 - DNA, 4011 bp, Homo sapien
gggtagagacggggtttcaccgtgttagccaggatggtctggatctcctgacctcgtgatccacccacctcggcctcctaaagtgctgggattacagacatgagccaccgcgcccagccctattcatcccttttcaaaagtcagaccctaggaagctggagggaggtggggcatggttttacagtgaatttctgatttcactcagggtgataaatcagactcttggggaagcgggtggtggctctggacagcagcaggaatggggatccagttagcaacaaatccatggacctatgacaggctgaaagccaccccttctccatctttgggaggttgccaatgtctgatttaacactatccaatgaatgatcattgaaagtaaaaaataactatcaactagcagaaaatataaatggtaagcattagcacatatttcacatgtttatatttggctctcagattgacctataaaacaaagtctgggaaattctatatgatcctgaaaaaatgatacgctggtctggatggtagaataagttggagaaatgtttaagccaaaatgcagtcttaccaatgactttttattttattttattaattttcaggatttttggtatacaggtggtttttggttacatggaaaagttctttactggtgatttctgagattttagttcaccccttatcctgagcagtgtacactgttcccaatatgtagccttttatccctcaccccctctaagttcaagaagactatggtcctgcagaaagctttatatgtaattaacatatctttatctttatctttataggcagtagactcatcttttgaaacagattccattaagagtgaatgtgtaccctccctctagcctttattattactgtttttgctattacatgtgttagtgtatgtgaatttaatgcttaaaaatgtatcccattggctactatggcaaaaggttgactcataagagtttagcacgggttaagatctgaaagttttctcccagcctcttatcactggcgcagacttcacaattcatggaagccaccagtgagatgacattgcctcaggcagttactatttttatattctataactcgaggagctcagggtttcggaaatcattaaactttttttgtccttttaaagttggagacagcaattgtagacagccttccagtgggttatctttttgtgtctccttacctgtggagaagcctattagctgggatatgtagttaaatagctatatttatatatatccagggcaccccgaattcgggagagcttcccggagtcgaccttcctgctggctgctctgtgaccgcttcccggctctgccctcttggccgaagtgcccgctgccgggcgcgggcctcagacaatacaatggtgggtgaagagaagatgtctctaagaaaccggctgtcaaagtccagggaaaatcctgaggaagatgaagaccagagaaaccctgcaaaggagtccctagagacacctagtaatggtcgaattgacataaaacagttgatagcaaagaagataaagttgacagcagaggcagaggaattgaagccattttttatgaaggaagttggcagtcactttgatgattttgtgaccaatctcattgaaaagtcagcatcattagataatggtgggtgcgctctcacaaccttttctgttcttgaaggagagaaaaacaaccatagagcgaaggatttgagagcacctccagaacaaggaaagatttttattgcaaggcgctctctcttagatgaactgcttgaagtggaccacatcagaacaatatatcacatgtttattgccctcctcattctctttatcctcagcacacttgtagtagattacattgatgaaggaaggctggtgcttgagttcagcctcctgtcttatgcttttggcaaatttcctaccgttgtttggacctggtggatcatgttcctgtctacattttcagttccctattttctgtttcaacattgggccactggctatagcaagagttctcatccgctgatccgttctctcttccatggctttcttttcatgatcttccagattggagttctaggttttggaccaacatatgttgtgttagcatatacactgccaccagcttcccggttcatcattatattcgagcagattcgttttgtaatgaaggcccactcatttgtcagagagaacgtgcctcgggtactaaattcagctaaggagaaatcaagcactgttccaatacctacagtcaaccagtatttgtacttcttatttgctcctacccttatctaccgtgacagctatcccaggaatcccactgtaagatggggttatgtcgctatgaagtttgcacaggtctttggttgctttttctatgtgtactacatctttgaaaggctttgtgcccccttgtttcggaatatcaaacaggagcccttcagcgctcgtgttctggtcctatgtgtatttaactccatcttgccaggtgtgctgattctcttccttactttttttgcctttttgcactgctggctcaatgcctttgctgagatgttacgctttggtgacaggatgttctataaggattggtggaactccacgtcatactccaactattatagaacctggaatgtggtggtccatgactggctatattactatgcttacaaggactttctctggtttttctccaagagattcaaatctgctgccatgttagctgtctttgctgtatctgctgtagtacacgaatatgccttggctgtttgcttgagctttttctatcccgtgctcttcgtgctcttcatgttctttggaatggctttcaacttcattgtcaatgatagtcggaaaaagccgatttggaatgttctgatgtggacttctcttttcttgggcaatggagtcttactctgcttttattctcaagaatggtatgcacgtcggcactgtcctctgaaaaatcccacatttttggattatgtccggccacgttcctggacttgtcgttacgtgttttagaagcttggactttgtttcctccttgtcactgaagattgggtagctccctgatttggagccagctgtttccagttgttactgaagttatctgtgttatttggaccactccaggctttacagatgactcactccattcctaggtcacttgaagccaaactgttggaagttcactggagtcttgtacacttaagcagagcagaactttttttgtggggctgggtggggggagaagaccgactaacagctgaagtaatgacagattgttgctgggtcatatcagctttatcccttggtaattatatctgttttgtttcttgactctgtccaatcagagaataaacatcatagtttcttggccactgaattagccaaaacacttaggaagaaatcacttaaatacctctggcttagaaattttttcatgcacactgttggaatgtatgctaattgaacatgcaattggggaagaaaaaatgtagaatgatttttgctatttctagtagaaagaaaatgtctgttttccaaagataatgttatacatcctattttgtaatttttttgaaaaaagttcaatgttcagttttccttagtttttaccttgttttctctataggtcatgatttctgtgaagcaaaaagatgccttttaccatgaattcttgagtttacatcaataatattgtatattaaggggatcagaagtaggaaggaaaaaataagagatagcagaggaaaaagaaaaacatttcctcttataacttctgaagtaatttgtaaaaaagatttgtagagtcaatcatgtgtttaaattattttatcacaaacttaacatggaagatattcctttttaactttgtggtaacttctttgaagttatttagaaatatcctttggaacaattattttattgtctaataaatattgacttctcttgaattattttgcagactagtgagtctgtac

SEQ ID NO: 1412 - protein, 550 aa, Homo sapien
MVGEEKMSLRNRLSKSRENPEEDEDQRNPAKESLETPSNGRIDIKQLIAKKIKLTAEAEELKPFFMKEVGSHFDDFVTNLIEKSASLDNGGCALTTFSVLEGEKNNHRAKDLRAPPEQGKIFIARRSLLDELLEVDHIRTIYHMFIALLILFILSTLVVDYIDEGRLVLEFSLLSYAFGKFPTVVWTWWIMFLSTFSVPYFLFQHWATGYSKSSHPLIRSLFHGFLFMIFQIGVLGFGPTYVVLAYTLPPASRFIIIFEQIRFVMKAHSFVRENVPRVLNSAKEKSSTVPIPTVNQYLYFLFAPTLIYRDSYPRNPTVRWGYVAMKFAQVFGCFFYVYYIFERLCAPLFRNIKQEPFSARVLVLCVFNSILPGVLILFLTFFAFLHCWLNAFAEMLRFGDRMFYKDWWNSTSYSNYYRTWNVVVHDWLYYYAYKDFLWFFSKRFKSAAMLAVFAVSAVVHEYALAVCLSFFYPVLFVLFMFFGMAFNFIVNDSRKKPIWNVLMWTSLFLGNGVLLCFYSQEWYARRHCPLKNPTFLDYVRPRSWTCRYVF

SEQ ID NO: 1413 - DNA, 1780 bp, Homo sapien
gcagtagaggcgcggggtgcggagctagggaggccgagagccatggcggcgctattggcggcggcggcagtgcgagcccggatcctgcaggtttcttccaaggtgaaatccagtcccacctggtattcagcatcttccttctcttcttcagtgccaactgtaaagctcttcattggtgggaaattcgttgaatccaaaagtgacaaatggatcgatatccacaacccagccaccaatgaggtcattggtcgggtccctcaggccaccaaggcagaaatggatgcagccattgcttcctgcaaacgtgcttttcctgcatgggcagacacttcagtattaagccgccagcaggtcttgctccgctatcaacaacttattaaagaaaacttgaaagaaattgccaagttaatcacattggaacaagggaagaccctagctgatgctgaaggagatgtatttcgaggccttcaggtggttgagcatgcctgtagtgtgacatccctcatgatgggagagaccatgccatccatcaccaaagacatggacctttattcctaccgtctgcctctgggagtgtgtgcaggcattgctccattcaattttcctgccatgatccccctttggatgtttcccatggccatggtgtgtggaaataccttcctaatgaaaccatctgagcgagtccctggagcaactatgcttcttgctaagttgctccaggattctggtgcccctgatggaacattaaacatcatccatggacagcatgaagctgtaaattttatttgcgatcatccggacatcaaagcaatcagctttgtgggatccaacaaggcaggagagtatatcttcgagagaggatcaagacatggcaagagggttcaagccaatatgggagccaagaaccatggggtagtcatgccagatgccaataaggaaaataccctgaaccagctggttggggcagcatttggagctgctggtcagcgctgcatggctctttcaacagcagtccttgtgggagaagccaagaagtggctgccagagctggtggagcatgccaaaaacctgagagtcaatgcaggagatcagcctggagctgatcttggccctctgatcactccccaggccaaagagcgagtctgtaatctgattgatagtggaacaaaggagggagcttccatccttcttgatggacgaaaaattaaagtgaaaggctatgaaaatggcaactttgttggaccaaccatcatctcgaatgtcaagccaaatatgacctgttacaaagaggagatttttggtccagttcttgtggttctggagacagaaacattggatgaagccatccagattgtaaataacaacccatatggaaatggaactgccatcttcaccaccaatggagccactgctcggaaatatgcccacttggtggatgttggacaggtgggagtgaatgtccccattccagtgcctttgccaatgttctcattcaccggctctcgatcctccttcaggggagacaccaatttctatggcaaacagggcatccaattctacactcagttaaagaccattacttctcagtggaaagaagaagatgctactctttcctcacctgctgttgtcatgcctaccatgggccgttagaaacaagtttgtttaagactgactccatcctgagtaatctccctttatttttgaccagcttcatttgtcagctttgctcagatcagatcgatgggattggaatacattgtaactaaaatcttaaaaaaaa

SEQ ID NO: 1414 - protein, 535 aa, Homo sapien
MAALLAAAAVRARILQVSSKVKSSPTWYSASSFSSSVPTVKLFIGGKFVESKSDKWIDIHNPATNEVIGRVPQATKAEMDAAIASCKRAFPAWADTSVLSRQQVLLRYQQLIKENLKEIAKLITLEQGKTLADAEGDVFRGLQVVEHACSVTSLMMGETMPSITKDMDLYSYRLPLGVCAGIAPFNFPAMIPLWMFPMAMVCGNTFLMKPSERVPGATMLLAKLLQDSGAPDGTLNIIHGQHEAVNFICDHPDIKAISFVGSNKAGEYIFERGSRHGKRVQANMGAKNHGVVMPDANKENTLNQLVGAAFGAAGQRCMALSTAVLVGEAKKWLPELVEHAKNLRVNAGDQPGADLGPLITPQAKERVCNLIDSGTKEGASILLDGRKIKVKGYENGNFVGPTIISNVKPNMTCYKEEIFGPVLVVLETETLDEAIQIVNNNPYGNGTAIFTTNGATARKYAHLVDVGQVGVNVPIPVPLPMFSFTGSRSSFRGDTNFYGKQGIQFYTQLKTITSQWKEEDATLSSPAVVMPTMGR

SEQ ID NO: 1415 - DNA, 912 bp, Homo sapien
ggatgctcaatatatattgatttaatcgggttatgtagggtgttaatataaaattagcatttattcagctactactatgagtctagccactgggctatagtggcttacatgttatagtaccaccgcacctggccctggtagtgatatttaatccaatccaacaactataggctgggttaaataaaaggtcattattgtctatattccaagtggaattaaatgtagtcacagagattcctaacattttccttatatttaagggaaatcacttctaaaaaaacacactaatcagaactgtgatgctctaattagaaacaactcatctggccaactatttgctgctcagagtttcttatttcttagatgaaaaaaactcatcagttatattcatgtgatcgcggctaaaaagtcagtattttctttttgttctaatgtggcttcatttgaaatttctcagattctacattgtactaattatgaataacaaattataaattaaaaactcttaaagagaaaaacttggcttaaaaaaatcatttcatatctccttataagcctttgtcctctaggttgtaatgactctgacttcccacctgtgatggaaagctaagagtcacaaggtcactatgtttactcttacgtaaaagatagtacacattttggctaggctgtttacttcaaaaggcaacctataggtttctacacaaaaagaggcacacatttgcatttgcattagtataatatgcatttgtacggatattgctttaaaaatttatgtaatctactaatgctatttattactcattccactgatccctgaagtctctcaactagtagagaaaataaccgtgatttagcaagaagcgacatggggaagggtgacaacaatatacattgtttgattagatacag

SEQ ID NO: 1416 - protein, 14 aa, Homo sapien
MGKGDNNIHCLIRY

SEQ ID NO: 1417 - DNA, 969 bp, Homo sapien
gagcccatgaaaactgacagtgctgaaagtgaagactgagattcaggagctgaggtgcccctgtgatccaggtcttccaccctgaaaccccatcctccatcaaggtcctgcctgtagagtctaccttgcaaagcctcctgctcctacccatgctacaggccaggaaccagagcccatcatctcagaggcccctggatgtccttcgaaggaaccaggaccctcagagcccagcatccatctctgtcatcatcttcatcacacccaaagaagagccagccttgcaggagggtttacatctccaggaagatgggctgccagcaactgcagaggatgcagccacctgcttaactgtgctgtccagccagccagccagctgcagggcctcttgctgcttaagagctgatgggccgggcatgtttggctcacaccttgtgagcacagtatgggaaatgggagcacagtactgggaaatgggagcacagtactgggaaatgggagctcacagtactggaaaatgggagcacagtactgggaaatgggagtacactactgggaaatgggagcacagtactgggaaatgggagcacagtactgggaaatgggagtacagtactgagaaatgggagcacagtactgggaaatgggatacagtactgggaaatgggagcccacagtactgggaaatgggagtcacagtactcggaaatgggagttcaagtactgggaaatgggagcacagtactgggaaatgggagcatagtactgggaaaccccagacctggattctgagtttttcagcctagcccagacttcttatcttagtagacaaaaagagtcaataccagagaaccagaggcatcctctgtattttaatgaactctgcattttaatctgtttagtagtcattttttaaaagataatcagttttccaaatatatctataagttactacgtgaaaaaaaaaaaaaa

SEQ ID NO: 1418 - protein, 217 aa, Homo sapien [sequence omitted]

SEQ ID NO: 1419 - DNA, 936 bp, Homo sapien
gagggcgcgatcctggcgtcccccgacggcctggggccccaatccagaggcctgggtgggaggggaccaagggtgtagtaaggaagcgccttttgctggagggcaacggaccggggcggggagtcgggagaccagagtgggaggaaggcggggagtccaggttccgccccggagccgacttcctcctggtcggcggctgcagcggggtgagcggcggcagcggccggggatcctggagccatggggcgcgcgcgcgacgccatcctggatgcgctggagaacctgaccgccgaggagctcaagaagttcaagctgaagctgctgtcggtgccgctgcgcgagggctacgggcgcatcccgcggggcgcgctgctgtccatggacgccttggacctcaccgacaagctggtcagcttctacctggagacctacggcgccgagctcaccgctaacgtgctgcgcgacatgggcctgcaggagatggccgggcagctgcaggcggccacgcaccagggctctggagccgcgccagctgggatccaggcccctcctcagtcggcagccaagccaggcctgcactttatagaccagcaccgggctgcgcttatcgcgagggtcacaaacgttgagtggctgctggatgctctgtacgggaaggtcctgacggatgagcagtaccaggcagtgcgggccgagcccaccaacccaagcaagatgcggaagctcttcagtttcacaccagcctggaactggacctgcaaggacttgctcctccaggccctaagggagtcccagtcctacctggtggaggacctggagcggagctgaggctccttcccagcaacactccggtcagcccctggcaatcccaccaaatcatcctgaatctgatctttttatacacaatatacgaaaagccagcttgaaaaaaaaaaa

SEQ ID NO: 1420 - protein, 195 aa, Homo sapien
MGRARDAILDALENLTAEELKKFKLKLLSVPLREGYGRIPRGALLSMDALDLTDKLVSFYLETYGAELTANVLRDMGLQEMAGQLQAATHQGSGAAPAGIQAPPQSAAKPGLHFIDQHRAALIARVTNVEWLLDALYGKVLTDEQYQAVRAEPTNPSKMRKLFSFTPAWNWTCKDLLLQALRESQSYLVEDLERS

SEQ ID NO: 1421 - DNA, 2354 bp, Homo sapien
agcgccgctgaattctaggcagaaagaaaagagctcccaaatgctatatctatcaggggctctcaagaacaatggaatatcatcctgatttagaaaatttggatgaagatggatatactcaattacacttcgactctcaaagcaataccaggatagctgttgtttcagagaaaggatcgtgtgctgcatctcctccttggcgcctcattgctgtaattttgggaatcctatgcttggtaatactggtgatagctgtggtcctgggtaccatgggggttctttccagcccttgtcctcctaattggattatatatgagaagagctgttatctattcagcatgtcactaaattcctgggatggaagtaaaagacaatgctggcaactgggctctaatctcctaaagatagacagctcaaatgaattgggatttatagtaaaacaagtgtcttcccaacctgataattcattttggataggcctttctcggccccagactgaggtaccatggctctgggaggatggatcaacattctcttctaacttatttcagatcagaaccacagctacccaagaaaacccatctccaaattgtgtatggattcacgtgtcagtcatttatgaccaactgtgtagtgtgccctcatatagtatttgtgagaagaagttttcaatgtaagaggaagggtggagaaggagagagaaatatgtgaggtagtaaggaggacagaaaacagaacagaaaagagtaacagctgaggtcaagataaatgcagaaaatgtttagagagcttggccaactgtaatcttaaccaagaaattgaagggagaggctgtgatttctgtatttgtcgacctacaggtaggctagtattatttttctagttagtagatccctagacatggaatcagggcagccaagcttgagtttttattttttatttatttatttttttgagatagggtctcactttgttacccaggctggagtgcagtggcacaatctcgactcactgcagctatctctcgcctcagcccctcaagtagctgggactacaggtgcatgccaccatgccaggctaatttttggtgttttttgtagagactgggttttgccatgttgaccaagctggtctctaactcctgggcttaagtgatctgcccgccttggcctcccaaagtgctgggattacagatgtgagccaccacacctggccccaagcttgaattttcattctgccattgacttggcatttaccttgggtaagccataagcgaatcttaatttctggctctatcagagttgtttcatgctcaacaatgccattggagtgcacggtgtgttgccacgatttgaccctcaacttctagcagtatatcagttatgaactgagggtgaaatatatttctgaatagctaaatgaagaaatgggaaaaaatcttcaccacagtcagagcaattttattattttcatcagtatgatcataattatgattatcatcttagtaaaaagcaggaactcctactttttctttatcaattaaatagctcagagagtacatctgccatatctctaatagaatcttttttttttttttttttttgagacagagtttcgctcttgttgcccaggctggagtgcaacggcacgatctcggctcaccgcaacctccgccccctgggttcaagcaattctcctgcctcagcctcccaagtagctgggattacagtcaggcaccaccacacccggctaattttgtatttttttagtagagacagggtttctccatgtcggtcagggtagtcccgaactcctgacctcaagtgatctgcctgcctcggcctcccaagtgctgggattacaggcgtgagccactgcacccagcctagaatcttgtataatatgtaattgtagggaaactgctctcataggaaagttttctgctttttaaatacaaaaataccataaaaatacataaaatctgatgatgaatataaaaagtaaccaacctcattggaacaagtattaacattttggaatatgttttattagttttgtgatgtactgttttacaatttttaccatttttttccagtaattacctgtaaaatggtattattggaatgaaactatatttcctcatgtgctgatttgtcttatttttttcatactttcccactggtgctatttttatttccaatggatatttctgtattactagggaggcatttacagtcctctaatgttgattaatatgtgaaaagaaattgtaccaattttactaaattatgcagtttaaaatggatgattttatgttatgtggatttcatttcaataaaaaaaaactcttatta

SEQ ID NO: 1422 - protein, 201 aa, Homo sapien
MEYHPDLENLDEDGYTQLHFDSQSNTRIAVVSEKGSCAASPPWRLIAVILGILCLVILVIAVVLGTMGVLSSPCPPNWIIYEKSCYLFSMSLNSWDGSKRQCWQLGSNLLKIDSSNELGFIVKQVSSQPDNSFWIGLSRPQTEVPWLWEDGSTFSSNLFQIRTTATQENPSPNCVWIHVSVIYDQLCSVPSYSICEKKFSM

SEQ ID NO: 1423 - DNA, 402 bp, Homo sapien
  Unsure 30, 173: Unknown base
gactcccaagcttgttttccaatcagtgtnaagctgtttgaaactctcctgtgtctgtgttttgtttgtgcgtgtgtgtgagagcacatcagtgtgtgcaggctgtgtttccccatttctctcctcccttcagacccatcattgagaacaaatgtaagaaatcccttcccacnaccctccctgcctcccaggccctctgcgggggaaacaagatcacccagcatccttccccaccccagctgtgtatttatatagatggaaatatactttatattttgtatcatcgtgcctatagccgctgccaccgtgtataaatcctggtgtctgctccttatcctggacatgaatgtattgtacactgacgcgtccccactcctgtacagctgctttgtttctttgcaa

SEQ ID NO: 1424 - DNA, 1579 bp, Homo sapien
gtctcgccctcttgcagtctgcagcttctcctgtcatcggaaatgccaggccaaggtggctgccccctgcgttcctccatccaaccatgagctggtgcccatcaccactgagaatgcaccaaagaatgtagtggacaagggagaaggaggctcccggggtggaaacacacggaaaagcctcgaggacaacggctccaccagggtcaccccgagtgtccagccccacctccagcccatcagaaacatgagtgtgagccggaccatggaggacagctgtgagctggacctggtgtacgtcacagagaggatcatcgctgtctccttccccagcacagccaatgaggagaacttccggagcaacctctctgagcggagacctgacatcacgaagctccatgccaaggtacaggaatttggctggcccgacctccacaccccagccctggagaagatctgcagcatctgtaaggccatggacacatggctcaatgcagaccctcacaatgtcgttgttctacacaacaagggaaaccgaggcaggataggagttgtcatcgcggcttacatgcactacagcaacatttctgccagtgcggaccaggctctggaccggtttgcaatgaagcggttctatgaggataagattgtgcccattggccagccatcccaaagaaggtacgtgcattacttcagtggcctgctctccggctccatcaaaatgaacaacaagcccttgtttctgcaccacgtgatcatgcacggcatccccaactttgagtctaaaggaggatgtcggccgtttctccgcatctaccaggccatgcaacctgtgtacacatctggcatctacaacatcccaggagacagccagactagcgtctgcatcaccatcgagccaggactgctcttgaagggagacatcttgctgaagtgctaccacaagaagttccgaagcccagcccgagacgtcatcttccgtgtgcagttccacacctgtgccatccatgacctgggggttgtctttgggaaggaggaccttgatgatgctttcaaagatgatcgatttccagagtatggcaaagtggagtttgtattttcttatgggccagagaaaattcaaggcatggagcacctggagaacgggccgagcgtgtctgtggactataacacctctgaccccctcatccgctgggactcctacgacaacttcagtgggcatcgagatgacggcatggaggaggtggtgggacacacgcaggggccactagatgggagcctgtatgctaaggtgaagaagaaagactccctgcacggcagcaccggggctgttaatgccacacgtcctacactgtcggccacccccaaccacgtggaacacacgctttctgtgtatttatatagatggaaatatactttatattttgtatcatcgtgcctatagccgctgccaccgtgtataaatcctggtgtatgctccttatcctggacatgaatgtattgtacactgacgcgtccccactcctgtacagctgctttgtttctttgcaatgcattgtatggctttataaatgataaagtt

SEQ ID NO: 1425 - protein, 398 aa, Homo sapien
MSVSRTMEDSCELDLVYVTERIIAVSFPSTANEENFRSNLSERRPDITKLHAKVQEFGWPDLHTPALEKICSICKAMDTWLNADPHNVVVLHNKGNRGRIGVVIAAYMHYSNISASADQALDRFAMKRFYEDKIVPIGQPSQRRYVHYFSGLLSGSIKMNNKPLFLHHVIMHGIPNFESKGGCRPFLRIYQAMQPVYTSGIYNIPGDSQTSVCITIEPGLLLKGDILLKCYHKKFRSPARDVIFRVQFHTCAIHDLGVVFGKEDLDDAFKDDRFPEYGKVEFVFSYGPEKIQGMEHLENGPSVSVDYNTSDPLIRWDSYDNFSGHRDDGMEEVVGHTQGPLDGSLYAKVKKKDSLHGSTGAVNATRPTLSATPNHVEHTLSVYLYRWKYTLYFVSSCL

SEQ ID NO: 1426 - DNA, 3931 bp, Homo sapien
  Unsure 2912: Unknown base
ccggcggcgagacggagaggcggcggaggtgccgcgcgcaggatctggtgggcggccgcgaggctcgggagaggcgaaccggagcgcgggaccgcggtcgccccgaccagagccgggagaccgcagcacccgcagccgcccgcgagcgcgccgaagacagcgcgcaggcgagagcgcgcgggcgggggcgcgcaggccctgcccgccccttccgtccccacccccctccgccctttcctctccccaccttcctctcgcctcccgcgcccccgcaccgggcgcccaccctgtcctcctcctgcgggagcgttgtccgtgttggcggccgcagcgggccgggccggtccggcggggccgggggatggcgctgctggacctggccttggagggaatggccgtcttcgggttcgtcctcttcttggtgctgtggctgatgcatttcatggctatcatctacacccgattacacctcaacaagaaggcaactgacaaacagccttatagcaagctcccaggtgtctctcttctgaaaccactgaaaggggtagatcctaacttaatcaacaacctggaaacattctttgaattggattatcccaaatatgaagtgctcctttgtgtacaagatcatgatgatccagccattgatgtatgtaagaagcttcttggaaaatatccaaatgttgatgctagattgtttataggtggcaaaaaagttggcattaatcctaaaattaataatttaatgccaggatatgaagttgcaaagtatgatcttatatggatttgtgatagtggaataagagtaattccagatacgcttactgacatggtgaatcaaatgacagaaaaagtaggcttggttcacgggctgccttacgtagcagacagacagggctttgctgccaccttagagcaggtatattttggaacttcacatccaagatactatatctctgccaatgtaactggtttcaaatgtgtgacaggaatgtcttgtttaatgagaaaagatgtgttggatcaagcaggaggacttatagcttttgctcagtacattgccgaagattactttatggccaaagcgatagctgaccgaggttggaggtttgcaatgtccactcaagttgcaatgcaaaactctggctcatattcaatttctcagtttcaatccagaatgatcaggtggaccaaactacgaattaacatgcttcctgctacaataatttgtgagccaatttcagaatgctttgttgccagtttaattattggatgggcagcccaccatgtgttcagatgggatattatggtatttttcatgtgtcattgcctggcatggtttatatttgactacattcaactcaggggtgtccagggtggcacactgtgtttttcaaaacttgattatgcagtcgcctggttcatccgcgaatccatgacaatatacatttttttgtctgcattatgggacccaactataagctggagaactggtcgctacagattacgctgtgggggtacagcagaggaaatcctagatgtataactacagctttgtgactgtatataaaggaaaaaagagaagtattataaattatgtttatataaatgcttttaaaaatctaccttctgtagttttatcacatgtatgttttggtatctgttctttaatttatttttgcatggcacttgcatctgtgaaaaaaaaaaaaaacacatctgtagtcttggccaaatgatacactttattttgtggaagtagagaatcaagagaattggttctaggaacctgggttcgttcatcattgttgtttatttttttaaaataaataaataaatatatatatagatgctctgcaacaaactctgtgacagtatccttcagtagagaaagtttcttacttgtgagtacactcttttagaacatttacgggtggcagcagctttgctttagagtttagaagataatagaaggaatgactattcatgtccaaagtgaatggttttgtgcagtgaacaacacatggcgaggtactaactgagaaactttttcatgctttatgcctacctcttgtagttgttgcagagcaaatacaaattgtaataagatagctaggccttgcagaaacaaacagaaaaacttaaaaaaaaatgatataagagctggagtctagtatttatatgaatctgtgagagataatttttttggtctcactgcaatgaaccaaaagcggctgagtttggtttttaattgtagccatgtattgaaggcatctttttgaccaactcttgttggttctgtcttgaaccattgttaatcactgtgctgtaattagtatagctaaatcttttccttccttgctcctcccccagcccaccccgtcttcccttaacattttttcagggggggttgggagtggtttcattttagtgtgagtggatgttttgatagttgtaaggaaaaaatgcatttcagacacatttcacacatgagctattttcttacacagtatgtcttattgttaataagaatgtaatttcatgatacaagtatttaataccttttttaagtcagtaaatattctagccatcaataaattgcagtagagtattaagaggggacaggatgagtttactcttaaaattaatcagtatcaaactaagtctactgtgtgtgttttttttttttgttttttgtttttgtttgtttactattatagtaagtctagtcttatttaaattggatttttgtattcaagtttatatgacaaaatagactagatcagcgctggttgtaaatgcatgctgtacctcactgttttctccccatcatgccgctaaacttgctcgccaggttgtgcttaacttgtggtgaactggacttgattctgttttgttttgtttttttaaanaaaaaaacaaaaatgtaagggacagtgcataagccttttctttgttaagtagtggtgttttgctttttcttcaggattggatggcatgttgtccacaggaatgcctactgcagggctaacactggcaatatggcagctttaaattctgagttactacagtctccatgtcaaagcataatgtgtagcatatcagcaataactacatatttatagaaaacactttttcactttactgagccaattcatttaattgtcaaatgtctatatccatggtttaaatggcaacatatctataagtatgtatacacattatatttaagcttttctctgggccaaactgcttcatccttttttctttcttttttttttttgtatagccttatgatgaatttgtttgaagggcattttctttatgaacaaaggcttggatgcatattcctttctttctgtgaatgggtattattccctgaggaaagttgcacagtgaaaaccagtctggttgtgacccactacatgttttgtttttaatcactattacctgagttgaactttgctcaccatgtttgtacttgttggtctgtttaatgaagtttggttgatgccatcctttgcactgccgaagcgtaatcttgtgtattacttagctctctgctgatctcagtatggacagtgtaacaacaaaaccaaaatggctggacagacttcttgtgttttgtaaatataaactaggacagttctgtaggtttgttcagtgtgctagtggagtatttccttaatgtaaaacttcacttaacagagagattctttgtttagcaagcttggagtgatgataaaatggtaagaaataatataaatgttgaagaaagcatcacaacagaactataggagtctaaatttaataaatctttaaaaaaaaccagtgtctagaatatataccatgttttattatttaaaatcattgtcttaaatttttgttcaaaaaataaaaatttgaatacaatcaaaaaaaataagtataa

SEQ ID NO: 1427 - protein, 514 aa, Homo sapien
  Unsure 2912: Unknown amino acid
RRRDGEAAEVPRAGSGGRPRGSGEANRSAGPRSPRPEPGDRSTRSRPRARRRQRAGESARAGARRPCPPLPSPPPSALSSPHLPLASRAPAPGAHPVLLLRERCPCWRPQRAGPVRRGRGMALLDLALEGMAVFGFVLFLVLWLMHFMAIIYTRLHLNKKATDKQPYSKLPGVSLLKPLKGVDPNLINNLETFFELDYPKYEVLLCVQDHDDPAIDVCKKLLGKYPNVDARLFIGGKKVGINPKINNLMPGYEVAKYDLIWICDSGIRVIPDTLTDMVNQMTEKVGLVHGLPYVADRQGFAATLEQVYFGTSHPRYYISANVTGFKCVTGMSCLMRKDVLDQAGGLIAFAQYIAEDYFMAKAIADRGWRFAMSTQVAMQNSGSYSISQFQSRMIRWTKLRINMLPATIICEPISECFVASLIIGWAAHHVFRWDIMVFFMCHCLAWFIFDYIQLRGVQGGTLCFSKLDYAVAWFIRESMTIYIFLSALWDPTISWRTGRYRLRCGGTAEEILDV

SEQ ID NO: 1428 - DNA, 2297 bp, Homo sapien
gactcctcatcacaaaaggcgcgaaagtgaacggtcggcagaagaacgggaccaccgccctcattcatgctgcagagaagaactttttaacaacagtggctattcttttggaagcaggagcttttgtaaatgtccagcaaagcaatggtgagactgcactgatgaaggcctgtaaaagaggaaattcagacatcgtacgactcgtaattgaatgtggagctgactgcaatattttgtcaaagcaccagaatagtgccctgcactttgcgaagcagtctaacaatgtgcttgtgtacgacttgctgaagaaccatttagagacactttcaagagtagcagaagagacaataaaggattactttgaagctcgccttgctctgctagaaccagtttttccaatcgcatgtcatcgactctgtgagggtccagatttttcaacagatttcaattacaaacccccacagaacataccagaaggctctggcatcctgctgtttatcttccatgcaaactttttgggtaaagaagttattgctcggctctgtggaccgtgtagtgtacaagctgtagttctgaatgataaatttcagcttcctgtttttctggacagtcattttgtttactcattcagccctgttgcaggtcccaataaactcttcataaggttgacagaagcaccctctgccaaggttaagttgctaataggtgcatacagagtgcagctgcagtgaccaaacagaagggactgggcggagttctcttcagaccgattcctatactctctttgacagcagtttggaattcttctagcacatctatgtaaagttttgtctgtaaacctcttgcagttaagcctgttgtctgttgtagtctgtaagatgcgacatagctgtgtctgtgccagtatgccggaatctcagtgcagtgtccagactgcgtatttcagtttttccacaatgtggatagtacatatgaggattatttaagaaaattaaagacttcactttcttttttctggagacggagtttcgctcttgttgcccaggctggagtgcaatggtgcgatctcggctcactgcaagctctgcctcctgggttcaagtgattctcctgcctcagcctcctgagtagctgggattacagacacccgccatggcacccagctaattttgtatttttagtagagatggggtttatccatgttggtcaggctggtcttgaactcctgacctcaggtgatccgcccgcctcggcctcccaaagtgcttggattacaggcatgagccaccgcacccagcaagagttattttcttaacttgaaattttctactagccctggtgaacttctgtgcttaaaaaaaaaaaaaaaaaaggaaaaattcagctctaaaacatttgcttacagcaagggagccatgttatattcaagttacccaagcaccaaataaagtgtgggtttgctgcccttgaaagggttgggaggcctgatctttttctagtagacagttgccacacattccccaagcacaaaaggtggagatggcagtcactttgtaaatatgctgtagtcacttatcatcttttcaaagggtaacaagagaatctaagatgtagtaagaatgtaaaccagtacactatgagacctaaaagagagtattaaatgtgaacttttagcagagcgtggtggctcacacctataatcccagcgctttggaggctgaggttggaggattgcttgagtccaggagttcaagaccagcctgggtaacatggggtggaacaagcctgtagtcccagatactcaggaggctgaggtgaaaggattgcttgggccagggaggtcaaggctgcagtgagccgtgaaaggccactgcactccagcctgggtgacagaatgagaccttgtctcaaaaaaaaaaaaaaaagtttcttggaacctatacggtttttttttgtttttttttttgaaaagccagaccttgtgcccttgttttgaacaccgactgggaagatggggcttaggtaacagccaaacctggctgtcagctgtgtgggagccaccaccctctctgggaagagttcctgcttctgtatggcaagcataaatcaagctcagtctgggttatggagaagttgaaaattgttttgttcctcattagtttataattgtatgaaatacgattttaatgaaaacttttcagaattcacgtttgtgtagatatttcagagaaccatttttactttacatcctaaaactgccttttcctatggttttgtcaataaaacactatgatgtt

SEQ ID NO: 1429 - protein, 189 aa, Homo sapien
MKACKRGNSDIVRLVIECGADCNILSKHQNSALHFAKQSNNVLVYDLLKNHLETLSRVAEETIKDYFEARLALLEPVFPIACHRLCEGPDFSTDFNYKPPQNIPEGSGILLFIFHANFLGKEVIARLCGPCSVQAVVLNDKFQLPVFLDSHFVYSFSPVAGPNKLFIRLTEAPSAKVKLLIGAYRVQLQ

SEQ ID NO: 1430 - DNA, 790 bp, Homo sapien
tgaaaacacaatcagctctgacagttagacatgcacacagacgccatagctggattggaaacattgatgttttaaaaatttatttttttttggaaatagttgcacaaatgctgcaatttagctttaaggttctatagatttttaactagtccaacacagtcagaaacattgttttgaatcctctgtaaaccaaggcattaatcttaataaaccaggatccatttaggtaccacttgatataaaaaggatatccataatgaatattttatactgcatcctttacattagccactaaatacgttattgcttgatgaagacctttcacagaatcctatggattgcagcatttcacttggctacttcatacccatgccttaaagaggggcagtttctcaaaagcagaaacatgccgccagttctcaagttttcctcctaactccatttgaatgtaagggcagctggcccccaatgtggggaggtccgaacattttctgaattcccattttcttgttcgcggctaaatgacagtttctgtcattacttagattccgatctttcccaaaggtgttgatttacaaagaggccagctaatagcagaaatcatgaccctgaaagagagatgaaattcaagctgtgagccaggcaggagctcagtatggcaaaggttcttgagaatcagccatttggtacaaaaaagatttttaaagcttttatgttataccatggagccatagaaaggctatggattgtttaagaactattttaaagtgttccagacccaaaaaaaaaa

SEQ ID NO: 1431 - DNA, 6678 bp, Homo sapien
ggaaggtttaaagaagaagccgcaaagcgcagggaaggcctcccggcacgggtgggggaaagcggccggtgcagcgcggggacaggcactcgggctggcactggctgctagggatgtcgtcctggataaggtggcatggacccgccatggcgcggctctggggcttctgctggctggttgtgggcttctggagggccgctttcgcctgtcccacgtcctgcaaatgcagtgcctctcggatctggtgcagcgacccttctcctggcatcgtggcatttccgagattggagcctaacagtgtagatcctgagaacatcaccgaaattttcatcgcaaaccagaaaaggttagaaatcatcaacgaagatgatgttgaagcttatgtgggactgagaaatctgacaattgtggattctggattaaaatttgtggctcataaagcatttctgaaaaacagcaacctgcagcacatcaattttacccgaaacaaactgacgagtttgtctaggaaacatttccgtcaccttgacttgtctgaactgatcctggtgggcaatccatttacatgctcctgtgacattatgtggatcaagactctccaagaggctaaatccagtccagacactcaggatttgtactgcctgaatgaaagcagcaagaatattcccctggcaaacctgcagatacccaattgtggtttgccatctgcaaatctggccgcacctaacctcactgtggaggaaggaaagtctatcacattatcctgtagtgtggcaggtgatccggttcctaatatgtattgggatgttggtaacctggtttccaaacatatgaatgaaacaagccacacacagggctccttaaggataactaacatttcatccgatgacagtgggaagcagatctcttgtgtggcggaaaatcttgtaggagaagatcaagattctgtcaacctcactgtgcattttgcaccaactatcacatttctcgaatctccaacctcagaccaccactggtgcattccattcactgtgaaaggcaaccccaaaccagcgcttcagtggttctataacggggcaatattgaatgagtccaaatacatctgtactaaaatacatgttaccaatcacacggagtaccacggctgcctccagctggataatcccactcacatgaacaatggggactacactctaatagccaagaatgagtatgggaaggatgagaaacagatttctgctcacttcatgggctggcctggaattgacgatggtgcaaacccaaattatcctgatgtaatttatgaagattatggaactgcagcgaatgacatcggggacaccacgaacagaagtaatgaaatcccttccacagacgtcactgataaaaccggtcgggaacatctctcggtctatgctgtggtggtgattgcgtctgtggtgggattttgccttttggtaatgctgtttctgcttaagttggcaagacactccaagtttggcatgaaaggttttgttttgtttcataagatcccactggatgggtagctgaaataaaggaaaagacagagaaaggggctgtggtgcttgttggttgatgctgccatgtaagctggactcctgggactgctgttggcttatcccgggaagtgctgcttatctggggttttctggtagatgtgggcggtgtttggaggctgtactatatgaagcctgcatatactgtgagctgtgattggggaacaccaatgcagaggtaactctcaggcagctaagcagcacctcaagaaaacatgttaaattaatgcttctcttcttacagtagttcaaatacaaaactgaaatgaaatcccattggattgtacttctcttctgaaaagtgtgctttttgaccctactggacatttattgacttaattgcttctgtttattaaaattgacctgcaaagttaaaaaaaaattaaagttgagaacaggtataagtgcacactgaatagtctaatctacatgtaacacatattttagtatgattttctatactctaatcagcactgaattcagagggtttgactttttcatctataacacagtgactaaaagagttaagggtatatataccatcactttgggacttggtagtattattaaaaggttatttccttcactgtcaataaaagtccaaatgtttagcttaggtctgagagtcaaacaatgttaaggattgtcttaaagttccttagccagcaaaacaaaacaaaacaaaacaaacaaatgaaaaacgtttaaaaagaagaagaagaagaaaaacaagaacaagcagcaacagctgttttgttggggctatagatttaagttaggcatagtcaatttcagaataactaagagtggaatatatgcatatggtgaaattataaccttgcccttttttatttgccctctgcgatccacctgctttttagaagtctgccgagtgagaaggccacagtatctcatgctgtttgcattacagaactgcagcttttctactctgaaaaggcctgggagcagaatggctggcctgctgtgagcaggagaggagattctaagaaggatagtcccccctacaacatactgtcatactgctgggttttcatgggtaggaaagcttgtcctgaccccagcagcaaagaggtggcaggtcgctaatgaatatatgctttataatgtccttcttcattgctgagagggcagccttagagctgtggatttctgcatcccccctgagtctgacccatggacacctgtttcattcactttagcatcacagtgacctttgtatgctctgttcagtctgtgtcaggcagtatgcttgtcctgaagagaggtttggctatccccaccccaccccaccccaccctgttccttttttatcaggaggacttcagagccaggcctgcagcattttgtttgaaaacacaatcagctctgacagttagacatgcacacagacgccatagctggattggaaacattgatgttttaaaaatttattttttttggaaatagttgcacaaatgctgcaatttagctttaaggttctatagatttttaactagtccaacacagtcagaaacattgttttgaatcctctgtaaaccaaggcattaatcttaataaaccaggatccatttaggtaccacttgatataaaaaggatatccataatgaatattttatactgcatcctttacattagccactaaatacgttattgcttgatgaagacctttcacagaatcctatggattgcagcatttcacttggctacttcatacccatgccttaaagaggggcagtttctcaaaagcagaaacatgccgccagttctcaagttttcctcctaactccatttgaatgtaagggcagctggcccccaatgtggggaggtccgaacattttctgaattcccattttcttgttcgcggctaaatgacagtttctgtcattacttagattccgatctttcccaaaggtgttgatttacaaagaggccagctaatagcagaaatcatgaccctgaaagagagatgaaattcaagctgtgagccaggcaggagctcagtatggcaaaggttcttgagaatcagccatttggtacaaaaaagatttttaaagcttttatgttataccatggagccatagaaaggctatggattgtttaagaactattttaaagtgttccagacccaaaaaggaaaaataaaaaaaaaggaatatttgtacccaacagctagaaggattgcaaggtagatttttgttttaaaatggagagaagtggacagataaggccatttaatatatcaaagatcagttgacatctcctagggaatgatgaaaacagcaggctattagaaaattatttcatatagttctcgtgttcttttcttttttttaatccctgaagggatgatcagtaacatagcttctcttttctgtactctagaccaccccttttcatcattttgctttttatgtctcccataagaaatgtgctttttagagcttcctaatgcatgtgttgcattattgcagcattagaaaaggagaggtagcatttttgctgaaatcgggcctgtcactctccaataaaggttctggcacttcaatgccaggcaggtctcctaaatgaacagaatgatctgtgtgagccgatgcctgcccttccagaggggccactgtccccagccgcagccaactgtgtcccacaggaatgggagcctaggtttccaaatcttgtgattctttaggagaaacatgaaacctggatttcgtgtgaaatgtcccgattgttaaaaagttggctcaattatttttaaaacattttgtaagccaacaaaagtctgtgggctgccagtttattacttttgtcttaaaacatgatcattgttctctcacggtatccttctgtcttcccgttgcaaattcacttttctttcttcctgacattgccattgagggctttgttaccacaagctaagaaactgagtttaacagcccagttatctgcaacatgtcaattacctttgctcctctcctgtgattcccaccatgctgtgaccctcagctgtctccctttgctgggaattctgcaccaatgtctcccctcaacccattccctggttggtcctactcccgtgtggccagagacatcctagcaaatccttcctcctattatatctgacactaatttcttttcaacagcgctcatgtctcttggcccagtcaggtgctgccaggtttagataggaaagtacatgtcccattttcatgggtgcccttaatgtggtccacgtcctatatcttattatatttactcatggctcaatgggggcctccagagaccctctcaggctgctgagctagactaaggaatgcatccactgtcatcacatgagacactgactctgtgacgacaaaagtacaaacagtctgaggctaagaaaggttcatctcacaacaggaaaaacaaatctcaacacacattagagataattgattcaggggttttctctcccagtctcccagcagggactgatttcatttctgacccactaggttttctttccagaaataggtagcaaggacaagaactaaacaatcccagccccacccagcaacacagaacacaggagtttgcttttggcttctcactctccaagtaaccctgaattaggcccagaatggctgaggcttggagcatctcctcagacagagcagaggcgacacctcttcaggggtgtgtggagtaaatagctcgaagagctgaagacagaaaaccagtttcacgccaggtgcgagagagagcgtaatggagggaagcccgctttctctctcctcttcttttctctttatttctttagagcacttgacttttttttctctctctctctagtattctaaactgaccccatgaccaactgagaatttatttttgtttcattggttgtttcacagaattagaacacacacgactttttattcctccattgcaaaatggaatcaagatactacacaagacctgtgctttcttcctttgcatgatttacacctccgcctgttttggtgctagctgtctagaacttctctcttggtttgaatctgattccttcacactacactagaagtttatttcatcttgttttgtctagactccagatacagagggacagctggactgaggacaagcaattccatctagcatagggtctctcagggttggtgcatccagccacatgggcagggccagtcacatctagtctatgtccccagagcccttggagttgcgcagcttagctgacttgactccaaggaaattagtacagaagtaaccactctattaagtgtgttctgctatgttcacatgcctgtagtacctgcaaaccatgccaggttcatctaaagacataggggaagattaaggactcttttggacagaccatgaattgaatttgctgccaggtgctgccagactgaatttggctgacagaactcccagcccaggaaagttccatgacaatgactgtcgcagaaggaaatttcccactaaagtcagtccattttcaagttttggtcttcagagacaaaagaacgtcccagccacctgattttgatggtgaggtaactctaagttgaattcaggctagtgttgcagtatagctttggcatgttcatgagtgagcacccagaatgtgttgaaccaacccccacccctaactactgactatgactgcagtgggtttttatggggaaaaaaagtgtgaaaagcaaaaagaaaggaacagagattttttatcacctttattgtaagacagtccatttatgaattgagtataaacacatacaaagtaacaagagattcctaagaaacgcaaatccttgagtttcacgcacttcatgttcaaccatttgctgtaatccagaggcagcctgtgaatcattctcatgccctgttttttttgttttttttcctataatgttctgggtttaaaagccatcttttccacattttctgtaaataatggataatcattttaaaaaattttatttttagtgctgttttaacaatgtagatagatcataaatgtacttgctgaattcaatcatttttaacaagccaataaagtttgataattcatctccaa

SEQ ID NO: 1432 - protein, 477 aa, Homo sapien
MSSWIRWHGPAMARLWGFCWLVVGFWRAAFACPTSCKCSASRIWCSDPSPGIVAFPRLEPNSVDPENITEIFIANQKRLEIINEDDVEAYVGLRNLTIVDSGLKFVAHKAFLKNSNLQHINFTRNKLTSLSRKHFRHLDLSELILVGNPFTCSCDIMWIKTLQEAKSSPDTQDLYCLNESSKNIPLANLQIPNCGLPSANLAAPNLTVEEGKSITLSCSVAGDPVPNMYWDVGNLVSKHMNETSHTQGSLRITNISSDDSGKQISCVAENLVGEDQDSVNLTVHFAPTITFLESPTSDHHWCIPFTVKGNPKPALQWFYNGAILNESKYICTKIHVTNHTEYHGCLQLDNPTHMNNGDYTLIAKNEYGKDEKQISAHFMGWPGIDDGANPNYPDVIYEDYGTAANDIGDTTNRSNEIPSTDVTDKTGREHLSVYAVVVIASVVGFCLLVMLFLLKLARHSKFGMKGFVLFHKIPLDG

SEQ ID NO: 1433 - DNA, 1866 bp, Homo sapien
gggcgcggcgccggaggaggaagtggtgaggttgttgctccttcagcgcctatcgctggctcttggggcgcagagaggggccgcagtctccgcggctgcgtcgagctcccttgcagtcccctccatgttccccggcgccactactccccttcctaaggccgccgcttaccccggggtctatggaagtaatggaaggacccctcaacctggctcatcaacagagcagacgagcagaccgtttattagctgcaggcaaatacgaagaggctatttcttgtcacaaaaaggctgcagcatatctttctgaagccatgaagctgacacagtcagagcaggctcatctttcactggaattgcaaagggatagccatatgaaacagctcctcctcatccaagagagatggaaaagggcccagcgtgaagaaagattgaaagcccagcagaacacagacaaggatgcagctgcccatcttcagacatctcacaaaccctctgcagaggatgcagagggccagagtcccctttctcagaagtacagcccttccacagagaaatgcctgcctgagattcaggggatctttgacagggatccagacacactactttatttacttcagcaaaagagtgagccagcagagccatgtattggaagcaaagccccaaaagatgataaaacaattatagaggagcaggcaaccaaaattgcagatttgaagaggcatgtggaattccttgtggctgagaatgaaagattaaggaaagaaaataaacaactaaaggctgaaaaggccagacttctaaaaggtccaatagaaaaggagctggatgtagatgctgattttgtagaaacgtcagagttatggagcttgccaccacatgcagaaactgctacagcctcctcaacctggcagaagttcgcagcaaatactgggaaagccaaggacattccaatccccaatcttcctcccttggattttccatctccagaacttcctcttatggagctctctgaggatattctgaaaggacttatgaataattaaaatggaaggccacagaaaaggggaaaagaggaaataatacagtaatcgttaatccagcaaaaagaaatgaaaagggaaaaccacatagaagggtaatcccggaaatgcttcatctggtggactgtgggagcagaggcattgccaggacttgggaaacagtcactgtgaaatgcgctgcgtatctcattcactcacttcagctaatgactccgacttggcagacgctaaactcatggaggttcggtttctcctgatacaaaccaaatggctacctggaagaatttctttcaagcaacagttatttttcttatcttcagggttaaaatgtataaaagttatgtgtaattaatctataatgccataaatgataatgcaaaacctaaataatatggtggccggaggggctgccttatatttgaaacatgctttctatcatgcattgactgtatgcattttgttaatgcacattctgtttgtttaaggtgtgtgagatacacacctttctagatgaaactatatgtgccacactttgcactactcataatgataacctcaagactatcagaagaaatatttaaatttccattttatgaagaaaggaaccaaattattatgctttttaaaacaaattaccagtttacataattaatcagggtgcattttaagttctaacttcgtttattgtataatgcatcatttgaaaataccaaggaggaaataccctttgtttttaatgatgcaagagtggacgtaatgctagttggcagtattttattgtaagaaatcaataaagtaattgtgttttaaaaaaaaaaaaaaaaaa

SEQ ID NO: 1434 - protein, 287 aa, Homo sapien
MEVMEGPLNLAHQQSRRADRLLAAGKYEEAISCHKKAAAYLSEAMKLTQSEQAHLSLELQRDSHMKQLLLIQERWKRAQREERLKAQQNTDKDAAAHLQTSHKPSAEDAEGQSPLSQKYSPSTEKCLPEIQGIFDRDPDTLLYLLQQKSEPAEPCIGSKAPKDDKTIIEEQATKIADLKRHVEFLVAENERLRKENKQLKAEKARLLKGPIEKELDVDADFVETSELWSLPPHAETATASSTWQKFAANTGKAKDIPIPNLPPLDFPSPELPLMELSEDILKGLMNN

SEQ ID NO: 1435 - DNA, 817 bp, Homo sapien
aaattgcagaagttacttattcttttaagaggtctgcctggttctgggaaaacaacattgtctcgaattctgcttggtcagaatcgtgatggcattgtgttcagcactgatgactattttcaccatcaagatgggtacaggtataatgttaatcaacttggtgatgcccatgactggaaccagaacagaggtttgttttgggctaagtgtcccaggatagaatatttggctaggagtcaaaagacctagattttattttcagcttaggtttttaccagctgaatgactgtaggcaagccgtttaaatagctttgagacctaatttctccatctgttagaggtggtgataattatacttgccctacctgatcagggtttttgtgaaaagcagagaatttagataaaacgctttgtaaactgtaaatagtttatcagtataagctggtaaaataatagcagcatgggatattttaagaggctttattttatacttgatgagtaaattcagagaactttgaatctgtaccattgttatgtagtcccaaagttatttccccgagaataatgctaatgttttccaaggcttaatatactggttgtgaatattaaaagtttttctcattgatattgctctacaagaaacctacttaatacattttttagcggacatgggtcaatttctgtttatcattaataggggttcttaacctgggctacacttttgaatttcttggggactttaaaaaaaagcaaaaaaatctatgtcgggtgcggagaaagaggtaatgaaatggcagaattcgatagcaagcttatc

SEQ ID NO: 1436 - protein, 82 aa, Homo sapien
KLQKLLILLRGLPGSGKTTLSRILLGQNRDGIVFSTDDYFHHQDGYRYNVNQLGDAHDWNQNRGLFWAKCPRIEYLARSQKT

SEQ ID NO: 1437 - DNA, 2720 bp, Homo sapien
cgctgggaatcctgctcctcctcaggtcctggcaagtttcagggcccctccctaggccttacttaaaaggctgaggcatccttggaggaacaggcagactccacagctcccgccaggagaaaggaacattctgaggggagtctacaccctgtggagctcaagatggtcctgagtggggcgctgtgcttccgaatgaaggactcggcattgaaggtgctttatctgcataataaccagcttctagctggagggctgcatgcagggaaggtcattaaaggtgaagagatcagcgtggtccccaatcggtggctggatgccagcctgtcccccgtcatcctgggtgtccagggtggaagccagtgcctgtcatgtggggtggggcaggagccgactctaacactagagccagtgaacatcatggagctctatcttggtgccaaggaatccaagagcttcaccttctaccggcgggacatggggctcacctccagcttcgagtcggctgcctacccgggctggttcctgtgcacggtgcctgaagccgatcagcctgtcagactcacccagcttcccgagaatggtggctggaatgcccccatcacagacttctacttccagcagtgtgactagggcaacgtgccccccagaactccctgggcagagccagctcgggtgaggggtgagtggaggagacccatggcggacaatcactctctctgctctcaggacccccacgtctgacttagtgggcacctgaccactttgtcttctggttcccagtttggataaattctgagatttggagctcagtccacggtcctcccccactggatggtgctactgctgtggaaccttgtaaaaaccatgtggggtaaactgggaataacatgaaaagatttctgtgggggtggggtgggggagtggtgggaatcattcctgcttaatggtaactgacaagtgttaccctgagccccgcaggccaacccatccccagttgagccttatagggtcagtagctctccacatgaagtcctgtcactcaccactgtgcaggagagggaggtggtcatagagtcagggatctatggcccttggcccagccccacccccttccctttaatcctgccactgtcatatgctacctttcctatctcttccctcatcatcttgttgtgggcatgaggaggtggtgatgtcagaagaaatggctcgagctcagaagataaaagataagtagggtatgctgatcctcttttaaaaacccaagatacaatcaaaatcccagatgctggtctctattcccatgaaaaagtgctcatgacatattgagaagacctacttacaaagtggcatatatttgcaattaattttaattaaaagatacctatttatatatttctttatagaaaaaagtctggaagagtttacttcaattgtagcaatgtcagggtggtggcagtataggtgatttttcttttaattctgttaatttatctgtatttcctaatttttctacaatgaagatgaattccttgtataaaaataagaaaagaaattaatcttgaggtaagcagagcagacatcatctctgattgtcctcagcctccacttccccagagtaaattcaaattgaatcgagctctgctgctctggttggttgtagtagtgatcaggaaacagatctcagcaaagccactgaggaggaggctgtgctgaagttgtgtggctggaatctctgggtaaggaacttaaagaacaaaaatcatctggtaattctttcctagaaggatcacagcccctgggattccaaggcattggatccagtctctaagaaggctgctgtactggttgaattgtgtccccctcaaattcacatccttcttggaatctcagtctgtgagtttatttggagataaggtctctgcagatgtagttagttaagacaaggtcatgctggatgaaggtagacctaaattcaatatgactggtttccttgtatgaaaaggagaggacacagagacagaggagacgcggggaagactatgtaaagatgaaggcagagatcggagttttgcagccacaagctaagaaacaccaaggattgtggcaaccatcagaagcttggaagaggcaaagaagaattcttccctagaggctttagagggataacggctctgctgaaaccttaatctcagacttccagcctcctgaacgaagaaagaataaatttcggctgttttaagccaccaaggataattggttacagcagctctaggaaactaatacagctgctaaaatgatccctgtctcctcgtgtttacattctgtgtgtgtcccctcccacaatgtaccaaagttgtctttgtgaccaatagaatatggcagaagtgatggcatgccacttccaagattaggttataaaagacactgcagcttctacttgagccctctctctctgccacccaccgcccccaatctatcttggctcactcgctctgggggaagctagctgccatgctatgagcaggcctataaagagacttacgtggtaaaaaatgaagtctcctgcccacagccacattagtgaacctagaagcagagactctgtgagataatcgatgtttgttgttttaaagttgctcagttttggtctaacttgttatgcagcaatagataaataatatgcagagaaagagaaaaaaaaaaaaaaaaaaaaaaaa

SEQ ID NO: 1438 - protein, 155 aa, Homo sapien
MVLSGALCFRMKDSALKVLYLHNNQLLAGGLHAGKVIKGEEISVVPNRWLDASLSPVILGVQGGSQCLSCGVGQEPTLTLEPVNIMELYLGAKESKSFTFYRRDMGLTSSFESAAYPGWFLCTVPEADQPVRLTQLPENGGWNAPITDFYFQQCD

SEQ ID NO: 1439 - DNA, 3655 bp, Homo sapien
agcgatccgaggcccggccccggccccgccccgcgccgcgccgcgccgcttgccgccgggctagcactgacgtgtctctcggcggagctgctgtgcagtggaacgcgctgggccgcgggcagcgtcgcctcacgcggagcagagctgagctgaagcgggacccggagcccgagcagccgccgccatggcaatcaaatttctggaagtcatcaagcccttctgtgtcatcctgccggaaattcagaagccagagaggaagattcagtttaaggagaaagtgctgtggaccgctatcaccctctttatcttcttagtgtgctgccagattcccctgtttgggatcatgtcttcagattcagctgaccctttctattggatgagagtgattctagcctctaacagaggcacattgatggagctagggatctctcctattgtcacgtctggccttataatgcaactcttggctggcgccaagataattgaagttggtgacaccccaaaagaccgagctctcttcaacggagcccaaaagttatttggcatgatcattactatcggccagtctatcgtgtatgtgatgaccgggatgtatggggacccttctgaaatgggtgctggaatttgcctgctaatcaccattcagctctttgttgctggcttaattgtcctacttttggatgaactcctgcaaaaaggatatggccttggctctggtatttctctcttcattgcaactaacatctgtgaaaccatcgtatggaaggcattcagccccactactgtcaacactggccgaggaatggaatttgaaggtgctatcatcgcacttttccatctgctggccacacgcacagacaaggtccgagcccttcgggaggcgttctaccgccagaatcttcccaacctcatgaatctcatcgccaccatctttgtctttgcagtggtcatctatttccagggcttccgagtggacctgccaatcaagtcggcccgctaccgtggccagtacaacacctatcccatcaagctcttctatacgtccaacatccccatcatcctgcagtctgccctggtgtccaacctttatgtcatctcccaaatgctctcagctcgcttcagtggcaacttgctggtcagcctgctgggcacctggtcggacacgtcttctgggggcccagcacgtgcttatccagttggtggcctttgctattacctgtcccctccagaatcttttggctccgtgttagaagacccggtccatgcagttgtatacatagtgttcatgctgggctcctgtgcattcttctccaaaacgtggattgaggtctcaggttcctctgccaaagatgttgcaaagcagctgaaggagcagcagatggtgatgagaggccaccgagagacctccatggtccatgaactcaaccggtacatccccacagccgcggcctttggtgggctgtgcatcggggccctctcggtcctggctgacttcctaggcgccattgggtctggaaccgggatcctgctcgcagtcacaatcatctaccagtactttgagatcttcgttaaggagcaaagcgaggttggcagcatgggggccctgctcttctgagcccgtctcccggacaggttgaggaagctgctccagaagcgcctcggaaggggagctctcatcatggcgcgtgctgctgcggcatatggacttttaataatgtttttgaatttcgtattctttcattccactgtgtaaagtgctagacattttccaatttaaaattttgctttttatcctggcactggcaaaaagaactgtgaaagtgaaattttattcagccgactgccagagaagtgggaatggtataggattgtccccaagtgtccatgtaacttttgttttaacctttgcaccttctcagtgctgtatgcggctgcagccgtctcacctgtttccccacaaagggaatttctcactctggttggaagcacaaacactgaaatgtctacgtttcattttggcagtagggtgtgaagctgggagcagatcatgtatttcccggagacgtgggaccttgctggcatgtctccttcacaatcaggcgtgggaatatctggcttaggactgtttctctctaagacaccattgttttcccttattttaaaagtgatttttttaaggacagaacttcttccaaaagagagggatggctttcccagaagacactcctggccatctgtggatttgtctgtgcacctattggctcttctagctgactcttctggttgggcttagagtctgcctgtttctgctagctccgtgtttagtccacttgggtcatcagctctgccaagctgagcctggccaagctaggtggacagacccttgcagtgatgtccgtttgtccagattctgccagtcatcactggacacgtctcctcgcagctgccctagcaaggggagacattgtggtagctatcagacatggacagaaactgacttagtgctcacaagcccctacaccttctgggctgaagatcacccagctgtgttcagaattttcttactgtgcttaggactgcacgcaagtgagcagacaccaccgacttcctttctgcgtcaccagtgtcgtcagcagagagaggacagcacaggctcaaggttggtagtgaagtcaggttcggggtgcatgggctgtggtggtgttgatcagttgctccagtgtttgaaataagaagactcatgtttatgtctggaataagttctgtttgtgctgacaggtggcctaggtcctggagatgagcaccctctctctggcctttagggagtcccctcttaggacaggcactgcccagcagcaagggcagcagagttgggtgctaagatcctgaggagctcgaggtttcgagctggctttagacattggtgggaccaaggatgttttgcaggatgccctgatcctaagaagggggcctgggggtgcgtgcagcctgtcggggagaccccactctgacagtgggcacacggcagcctgcaaagcacagggccaccgccacagcccggcagaggggcacactctggagaccttgctggcagtgctagccaggaaacagagtgaccaagggacaagaagggacttgcctaaagccacccagcaactcagcagcagaaccaagatgggccccaggctcctccatatggcccagggcttaccaccctatcacacgtggccttgtctagacccagtcctgagcaggggagaggctcttgagacctgatgccctcctacccacatggttctcccactgccctgtctgctctgctgctacagaggggcagggcctcccccagcccacgcttaggaatgcttgcctctggcaggcaggcagctgtacccaagctggtgggcagggggctggaaggcaccaggcctcaggaggagccccatagtcccgcctgcagcctgtaaccatcggctgggccctgcaaggcccacactcacgccctgtgggtgatggtcacggtgggtgggtgggggctgaccccagcttccaggggactgtcactgtggacgccaaaatggcataactgagataaggtgaataagtgacaaataaagccagttttttacaaggtaaaaaaaaaaaaaaaaaaaaa

SEQ ID NO: 1440 - protein, 476 aa, Homo sapien
MAIKFLEVIKPFCVILPEIQKPERKIQFKEKVLWTAITLFIFLVCCQIPLFGIMSSDSADPFYWMRVILASNRGTLMELGISPIVTSGLIMQLLAGAKIIEVGDTPKDRALFNGAQKLFGMIITIGQSIVYVMTGMYGDPSEMGAGICLLITIQLFVAGLIVLLLDELLQKGYGLGSGISLFIATNICETIVWKAFSPTTVNTGRGMEFEGAIIALFHLLATRTDKVRALREAFYRQNLPNLMNLIATIFVFAVVIYFQGFRVDLPIKSARYRGQYNTYPIKLFYTSNIPIILQSALVSNLYVISQMLSARFSGNLLVSLLGTWSDTSSGGPARAYPVGGLCYYLSPPESFGSVLEDPVHAVVYIVFMLGSCAFFSKTWIEVSGSSAKDVAKQLKEQQMVMRGHRETSMVHELNRYIPTAAAFGGLCIGALSVLADFLGAIGSGTGILLAVTIIYQYFEIFVKEQSEVGSMGALLF

SEQ ID NO: 1441 - DNA, 3576 bp, Homo sapien
gaaaggtcacagcgcggcagcgggtctggctggcggcagcggcgggagggagccgagagacccgagtgcacgtgtggagaagcggcggcacaagcgcggcggcgggagacactcccgcccccaccagactcaagccctcactcgactctcgcggccttcgttgctcgcacagctccctgcccaggctaggaggccggcttgcggggttgagtggcccgagctaagggtgcggagacctaagggcggcgactacgacggcgttgatatcggtggtaacgacggcctcagcaggcggggaagatgaaaggtagccggatcgagctgggagatgtgacaccacacaatattaaacagttgaaaagattgaatcaggtcatctttccagtcagctacaatgacaagttctacaaggatgtgctggaggttggcgagctagcaaaacttgcctatttcaatgatattgctgtaggtgcagtatgctgtagggtggatcattcacagaatcagaagagactttacatcatgacactaggatgtctggcaccttaccgaaggctaggaataggaactaaaatgttaaatcatgtcttaaacatctgtgaaaaagatggtacttttgacaacatttatctgcatgtccagatcagcaatgagtcggcaattgacttctacaggaagtttggctttgagattattgagacaaagaagaactactataagaggatagagcccgcagatgctcatgtgctgcagaaaaacctcaaagttccttctggtcagaatgcagatgtgcaaaagacagacaactgaacaaattacaaatgaactttcttgcacttgcttgtcgccaaataaaagagaggcccattgattcctcccccaccccaacacttttcttttaaagcttttctccctccttgttcttgtttttctttcttcctttccttttctctgagagttttaatactttcaaggactttaaaaaaataatcatgtttgaattgttttctcttatttttgtgaggtggtttgaaggaaggacaaggtagatctgtttagttttgcagttgaagttagatggtcctaaacatttaattgtcaaataatttcaaatttaatgtcctgctttcacattgaagggcagagcctacaaaacattgtatatttcaaaagacaaaaagaagcagcagcagtatcttgttctctaattcatagacaagttgagtgtgtttgtggtactttgggtttttaaacactttgggatactaatccctagacattgccttcactccacctttagtccttctgagcactctctcgggagttggaacattgttatccttgtaagaaatactaagcttatgttgatttttaagtaattatatcttctcttcttgctggtgggtggggcagtttggtttagtgttatactttggtctaagtatttgagttaaactgcttttttgctaatgagtgggctggttgttagcaggtttgtttttcctgctgttgattgttactagtggcattaacttttagaatttgggctggtgagattaattttttttaatatcccagctagagatatggcctttaactgacctaaagaggtgtgttgtgatttaattttttcccgttcctttttcttcagtaaacccaacaatagtctaaccttaaaaattgagttgatgtccttataggtcactacccctaaataaacctgaagcaggtgttttctcttggacatactaaaaaatacctaaaaggaagcttagatgggctgtgacacaaaaaattcaattactgtcatctaatgccagctgttaaaagtgtggccactgagcatttgattttataggaaaaaatagtatttttgagaataacatagctgtgctattgcacatctgttggaggacatcccagatttgcttatactcagtgcctgtgatattgagtttaaggatttgaggcaggggtaattattaaacatattgcttctattcttggaaaaatagaagtgtaaaatgttaataatacaaatgtcactgtgacctcctccactgtgaggactggtttatgccagatcattttccggcacacacggagtggctttgacagattgataactttgtaagatgggagacatctgaaatattcatgttttccttttgtagtcccatctccactatttagaaatgttctcagactttaaaataatgcacagggcttgagctttctgtcatttgactttaaaaggaagtttcattcatatttatcctcttatgtaaaattgcggtataaagtctcatttccaaatatgttaaatgacaaaattattttataaaatgtttatgcacactttataaccttaagtttttatttgagaatgtgaaagtacaaagtgcagtagacttcaacaatcttgagtgccaagaataatacagaaaaagaagacagttgatgaatgagtttatagggttctaatcttaagatggtaaaaatgtagaaagaccttgctggttttttgggggtattcgtttcttaaacaatccaaatctaagcttagaagaaaagtttagcgttaagcacctttatcttcatgaataagcttcagcttgctcttggcaagagaagagtgcttgagttacagaaggcataagtagtttgaagaatgcagcagcctttttgtaaacttcccagatatcaaaatagactttgatatataaatggttttctgagatgacactgcctctatttctataaccatttcacctggactatctaaccagtcctatgaatgtatccctaaatgtggttattgaaaacctaatagctgcctcatgacaagtacatgttatttaaggaggaaaaaatattaaattttgaattgagtgtgtaggctccctatcattatatatagagtttctttttccacggtagtcagtgacttaacctgaattgtaaatgtttgtaaagggttaattgtcctacatcaaacttagttaaataattccatccacttatggaggaggaggagaatgtggaagaggtaaaaagctgggcacaagttcatatgcctatgagtcagtaaagactgaagtaatgtcctatgttgagctggttattttgatatatgataataattatctttgaagtagaacaattctgttaactggaaaatcacaggatatatccatcatatttttcaggacagatagtttttactgtggggcaaataggttaaaattacactatgttagttgcatttaggttttaaagcaaagaatctgtagagaaatctatgcaatatatagtttgtccagattagctttcatttggggaatgaagttctgaaatatctaaagcagtttactcatcaattgaaaagtcctccaaaaagagaactattgggaaaccatggtgtggtggtggaaaagaaaagctccctcagttttttggagggaataacttaaaaaaatacttaaatggctaagtttacttggtgcagttaagaattaaacttgtcaattttaacattgctgttacatctgaaataaacttatgtgatgttctggt

SEQ ID NO: 1442 - protein, 169 aa, Homo sapien
MKGSRIELGDVTPHNIKQLKRLNQVIFPVSYNDKFYKDVLEVGELAKLAYFNDIAVGAVCCRVDHSQNQKRLYIMTLGCLAPYRRLGIGTKMLNHVLNICEKDGTFDNIYLHVQISNESAIDFYRKFGFEIIETKKNYYKRIEPADAHVLQKNLKVPSGQNADVQKTDN

SEQ ID NO: 1443 - DNA, 2284 bp, Homo sapien
gccgggtggatggtactgctgcatccgggtgtctggaggctgtggccgttttgttttcttggctaaaatcgggggagtgaggcgggccggcgcggcgcgacaccgggctccggaaccactgcacgacggggctggactgacctgaaaaaaatgtctggatttctagagggcttgagatgctcagaatgcattgactggggggaaaagcgcaatactattgcttccattgctgctggtgtactattttttacaggctggtggattatcatagatgcagctgttatttatcccaccatgaaagatttcaaccactcataccatgcctgtggtgttatagcaaccatagccttcctaatgattaatgcagtatcgaatggacaagtccgaggtgatagttacagtgaaggttgtctgggtcaaacaggtgctcgcatttggcttttcgttggtttcatgttggcctttggatctctgattgcatctatgtggattctttttggaggttatgttgctaaagaaaaagacatagtataccctggaattgctgtatttttccagaatgccttcatcttttttggagggctggtttttaagtttggccgcactgaagacttatggcagtgaacacatctgatttcccacagcacaacagccctgcatgggtttgtttgtttttttactgctcactcccaaccttttgtaatgccattttctaaacttatttctgagtgtagtctcagcttaaagttgtgtaatactaaaatcacgagaacacctaaacaacaaccaaaaatctattgtggtatgcacttgattaacttataaaatgttagaggaaactttcacatgaataatttttgtcaaattttatcatggtataatttgtaaaaataaaaagaaattacaaaagaaattatggatttgtcaatgtaagtatttgtcatatctgaggtccaaaaccacaatgaaagtgctctgaagatttaatgtgtttattcaaatgtggtctcttctgtgtcaaatgttaaatgaaatataaacattttttagtttttaaaatattccgtggtcaaaattcttcctcactataattggtatttacttttaccaaaaattctgtgaacatgtaatgtaactggcttttgagggtctcccaaggggtgagtggacgtgttggaagagagaagcaccatggtccagccaccaggctccctgtgtcccttccatgggaaggtcttccgctgtgcctctcattccaagggcaggaagatgtgactcagccatgacacgtggttctggtgggatgcacagtcactccacatccaccattgaaggaaaggaaaaaagggcagagacttgacactccagtcttagacaggggacaatttctttgtagttgttctgataataaactgggttccatgttgcatttcatctgtgtactgaaccactagcctaatagaccagcacggtcaactagaatgacaaacattagctactgggaactcttgttgtctcttcctcttcagaactcttgtccccccaggctccccacctctgcaagatgggatacactcttcaggaccacagtttgaaatgtctttcataaaatgtgctacaattagccttcggaatatttgctgggtgatttaaatgtgtgggtctcatttccatgctagccatggtcatctgacagtctctacgctgtgaatattgcctggtgatcaagactctcctcaaagaaatgacttgctgtcatcccacatgaactcctgatgttttttctacaaaagtccataaaatgtgaaaactggagaagatcttagaggttgaagcccaccttctcttttcacataggagggaacagaccatggaaatttaaacgacttcctcacggtcacagaactagttttttaatcctcaggcagtgcatccccccaccctacaactgagcacaacctctttccccacagtgcaattcagaatatgctcagggaatgccagccaccttgtaaaactgctgggagaaaagcatgattcccacaaggactaagtatcagtgatttgtaattttcctgttttgtattatctgctttgctgatgtagacaagagttaactgagtagcatgctttattaagcatgagaaagaatcttaagaattgtcaataaaattaacccaaaactttaataatgtgtctgtaaccaagaaaatattgatagcatcatcctaatgaaactaaacatttattttaaacttattaaattgactcttaaactaaaaaa

SEQ ID NO: 1444 - protein, 157 aa, Homo sapien
MSGFLEGLRCSECIDWGEKRNTIASIAAGVLFFTGWWIIIDAAVIYPTMKDFNHSYHACGVIATIAFLMINAVSNGQVRGDSYSEGCLGQTGARIWLFVGFMLAFGSLIASMWILFGGYVAKEKDIVYPGIAVFFQNAFIFFGGLVFKFGRTEDLWQ

SEQ ID NO: 1445 - DNA, 3641 bp, Homo sapien
  Unsure 500-526: Unknown base
caccattgagctgttttccttgatggccacatgatttctagcatttttttttttttggtcaaaatattcccggtttctgtaaaaatttcatttttaaattaaacggtgatggatgagctatcataatccaagtatacttttcttttttctatcagatatccatggtcatgcagtagtagtaaaaacatccaaagatgccagcaagccttattaagtattattttcctaaaagaaataggaggcattttcatctttattattgtacttttggttatgcaaacactttgataatataaacagttatgtcccctataaatctggtcagcaacctcttttgattttgttgggtaagttaaatagtctgtagtaggtagagtactgggtacaagtggtccaaactaagataagagactaaaataaaatgctaaatcttaaaagaaactgggtttatgcactaaacgttttgtgccttggtctaatattaacatgatgtatgtgtnnnnnnnnnnnnnnnnnnnnnnnnnnnccagtgttgaatcatgctatatttcccatcatcccagattgctaaatgttctttccaagaagtctgaatgaattattatatacatttgctatcatacatgacagttgtgtcattattagagatttcagtaattaaaatgggaaacagaagcctaagttatttaccttatcaaaaccacgttccttggaaccacattattatgatggtttttgtgctcttgtacgttggatgtcttaagctgagtacagtttaggggatcctttctaatgacaggaaggcactgctttcctcaacactgtgatctgacctgtgacaagtctgtactatccactatgtaaatggctcacaagtcaattgcaaacaaactgaatgtacaaatcttagtgctggtgctgaaatctcttcagaatagtcatcatgatttaaaagtttgtttaaaaatttgcaagcatcaagtgtcaatcaaaactgaagatgaaacactaatgaatgttgaattctcatgcttttaggtgtacttcctttttagaattttcagttttctgctatttttaccgtaactatttcgtttaaatttgtttcatttaagtttcctacatgctaacttcgtttgtgcgattgaaataaaattgcagtatatatatgttgcttgtttgtgacacttagataatcttctgaaataatttgttttaaagtaagttatattggatgtgaaaaacaccttttaaagtccaagactttactacttaaaagtttacatgtcacgtcactattctttacagatttcatagaagtcgtgaatactaagtaatgtatacaaaagaaatatgtgatgatgtgtctactttttgtttgaaataactgttgggtgttccctcttcttattttctctctgcccaccttgacacagtaacttcctcttatagtcaagatgatgattaagtgtttaatttttattccattttgttctgcaacacgttcagatacttaaaactcattcatgcagttagaattatcctttatgtagtttgcatggtaaaggacattgtgtggtaaagggcattattgagtaatgaattttaagtatagcaaaatatgtatagtgtttatacatgatgctgatttcttaaaacctacatataagcagtagtactttttctctattataaagtattaattttgagttccattttataattctgatgtcttcattagaaatacaaaaatacaatccttgtattttttctttgaccagacccaaattttccccttcccccctccattctcctctccacttctcgtggaccgcgtgttcccaatattcattaacatttgcagccattacagagttacagttgtaaaattttcagctgttttttttttttgctctagcctgtctcatgttcttgcttctcttcatatgtaagtcagtatttttgtctacaaattaaaagtcacttgtcattcaaaaatgagttaagtaacatgataatcttttaaatttacctagctacaacttttatgtctcttgtaaatttatatatactttcagtgccattgtgaagaattggccttttaattctaagtagtattaccctatgaagcacagtgtgcaaaggtatgctacaaggtctctttaattcctgtgtggccattataattttataacaccattaccctttaaattctaccgattataagcagcgtaaaagtaactatataaagcaaacatcgcaaaggaactctgcaggagctcttaattcctttatgtagctatcataaaattcactttcctgaagacatttactctcattcacttccaaactccaaacctttttctggtagcaccacttttgtttttaatagaaagatgagttcatatctgtacatctctccaaagctctaaggaatgagaaaaggatcctagtatattgaaattactgatgtttaatacctctgccttttcactaaaagccatttaatatttttaaagtcaaaacttgacatacaggtatttataaggaatctccatgactctgaaggaatgaaattgatgtaggtagctttggctatgtaaagacatagtagaggacaattacttaaagaagagttttcttttgaggatttgtagatttgactaagcagctgaagtcagtaacccctcaagaaaggccgtttatagaagccaagaactgttggaggtctgtgatgcaggtttttctgttcccaacatcaaaagctgtggattatttggtgtgtcccctttatgttatctctcgataatttttgagacatcaagattttttaaaatatcaatactggaaagatgaaaccttcaaattaaaacctaaaattgattagaaagaaaagtaaaatattaatgcagtaaatttaggatggttacagatactcaccatcaacataaataaatggagttctaggataaattatttgtggaatactaatggtcaagtcacataagagtaaaatcttttggtgaggagacacatttgacaactgctaaagaattaactaaatttgtctttctaaatagttttctttataaagtaacagaaacattgtaaaaggataaataaatgactgtcataatgacttaggatgttgtaagaatgtctgccacatttattggttatttctgttgaaatctgaaggaatcgatacatctgaaaattgagaaagggaaataggactgtccccgttacagatactctgtgatgcacacaaccttctaaacggaagtgttagtatcatttaaagcacatagtaggccttgagtatttgcagattaacatgcagaaaaaatcaaagatgaagccccaattaagtgtttgaaccaaagaatcacagtcactgagctgcacccccgttctgtgaagcatgttaaatactcataaagagcagagagcagggcccgtagacgcttctggtgtaggacacaggaattctaggcagagggagaaaattaggggccccagttggtggctgagagtaaaaagaatataccatttgagtagtgctgttctttttcctcagtttttaaagacatataattcctagtagttaggacatctaaatagctcggtaaactggtcag

SEQ ID NO: 1446 - protein, 10 aa, Homo sapien
  Unsure 500-526: Unknown amino acid
TIELFSLMAT

SEQ ID NO: 1447 - DNA, 1786 bp, Homo sapien
gcagtccaggctggactgggcggcatttgccgaggctcctcggccaggccccgtccgcccgagccgcgctgagagggcagcggccgcgtggagaggaggtggcagcggccgggagcgatgccaagccagcgacccaccatggagacccgctacaacctgaagagtccggctgttaaacgtttaatgaaagaagcggcagaattgaaagatccaacagatcattaccatgcgcacgctttagaggataacctttttgaatggcacttcacggttagagggcccccagactccgattttgatggaggagtttatcacgggcggatagtactgccaccagagtatcccatgaaaccaccaagcattattctcctaacggctaatggtcgatttgaagtgggcaagaaaatctgtttgagcatctcaggccatcatcctgaaacttggcagccttcgtggagtataaggacagcattattagccatcattgggtttatgccaacaaaaggagagggagccataggttctctagattacactcctgaggaaagaagagcacttgccaaaaaatcacaagatttctgttgtgaaggatgtggctctgccatgaaggatgtcctgttgcctttaaaatctggaagcgattcaagccaagctgaccaagaagccaaagaactggctaggcaaataagctttaaggcagaagtcaattcatctggaaagactatctctgagtcagacttaaaccactctttttcactaactgatttacaagatgatatacctacaacattccagggtgctacggccagtacatcgtacggactccagaattcctcagcagcatcctttcatcaacctacccaacctgtagctaagaatacctccatgagccctcgacagcgccgggcccagcagcagagtcagagaaggttgtctacttcaccagatgtaatccagggccaccagccaagagacaaccacactgatcatggtgggtcagctgtactgattgtcatcctgactttggcattggcagctcttatattccgacgaatatatctggcaaacgaatacatatttgactttgagttataatatggttttgtgacttatgagctgtgactcaactgcttcattaaacattctgcattgggtataatctaagaattgtttacaaaaagattattttgtatttacccttcattcctttttttgatccttgtaagtttagtataaatatatctagacattcagactgtgtctagcagttacgtcctgcttaaagggactagaagtcaaagttccttgtctcactatttgatctgctttgcagggaaataacttgttttttctcatgtttcatcttctttttatgtaaatttgtaatactttcctatattgccctttgaaatttttggataaaagatgatgttttaagttccaatgagtattactagttactcaataccacttattgagtactctgtttctacgtatgtagaatgtatagggatagaagagttgaaaagggaaagcaaaactcctcaagtagcttccttaaaatgtcattcataggagatgtactggaattgctcattctgtgactttatttgtgtcctaaacattcttcagtgaaaataattttatttcagtcaaacatttatgaggaaatgagatcacatctttgtcactggatgctacttgaagagggagtactttgtaaccactttgatatgctgttatcaccaccccctgccctctgctgccataatcacacaaatttaaa

SEQ ID NO: 1448 - protein, 325 aa, Homo sapien
MPSQRPTMETRYNLKSPAVKRLMKEAAELKDPTDHYHAHALEDNLFEWHFTVRGPPDSDFDGGVYHGRIVLPPEYPMKPPSIILLTANGRFEVGKKICLSISGHHPETWQPSWSIRTALLAIIGFMPTKGEGAIGSLDYTPEERRALAKKSQDFCCEGCGSAMKDVLLPLKSGSDSSQADQEAKELARQISFKAEVNSSGKTISESDLNHSFSLTDLQDDIPTTFQGATASTSYGLQNSSAASFHQPTQPVAKNTSMSPRQRRAQQQSQRRLSTSPDVIQGHQPRDNHTDHGGSAVLIVILTLALAALIFRRIYLANEYIFDFEL

SEQ ID NO: 1449 - DNA, 2535 bp, Homo sapien
ctgggggcggggcaggggcaggtgtagcctctgtgcctcgttgtcccctggcgctacccggacatctctcagggtgccggcaccatgaagatctggacttcggagcacgtctttgaccacccgtgggaaactgttacaacagctgcaatgcagaaatacccaaaccctatgaacccaagtgtggttggagttgatgtgttggacagacatatagatccctctggaaagttgcacagccacagacttctcagcacagagtggggactgccttccattgtgaagtctcttattggtgcagcaagaacgaaaacatatgtgcaagaacattctgtagttgatcctgtagagaaaacaatggaacttaaatctactaatatttcatttacaaacatggtttcagtagatgagagacttatatacaaaccacatcctcaggatccagaaaaaactgttttgacacaagaagccataattaccgtgaaaggagttagcctcagcagttaccttgaaggactgatggcaagtacgatatcctcaaatgctagtaaaggccgagaagcaatggaatgggtaatacataaattaaatgctgagattgaagaactgacagcctcagcaagaggaaccataaggactccaatggcagcagcagcgttttgcagagaagtgatcgtgacagttggtagacaacatcgggtactccaggtctctccaaactgactatatatttatttgttattttaaaaatacaactatattttgggtagttttttttttttttttttttgataagttggtgtaaggctatgtgacttgatcaaaacagatgcagggcctctaaataaaagggatcatctgaaattaatgttgtttgaaattactatctgattttgagggttccagtatttctgtgaaaattcaacaagaactccttggaaactggtattgatattcagtctccttaaggtagatttttcaagcttttcatacattggaactccacctgactttggaccaaccccagaacagagcagagccacctcctatagacgcccattgccctgctgctgtacacttcagcagcttgcacaagggagctcacttaaaaggagaaattgtgtagttttaaaatatattttgtgtaaaataccttactatgctataaaccaccattaaaaaccagtgttttgatttggtacttaaatatttttggagtgaaaattatcactaaagtaacatgactccaacaaaagtatggtttcattataaaagagtactgtattgatttgcccaagttttgtaacttagtaaaggtattaacttccttggatttgtactttgtgatttagtatgctgtatcgtgggctggttatgttaactgaaaaaaataaagtcattacctgagttttgcagtgctctaacttaaacagaagaacagctgttcacatcttttagcattttacatttgcctaacttaaaaattgccatgtgtcaaaatcatggttttgtaattgctaaggcatgatatgtcaggttatttgaatataattactttttgaagtaattgtgaccacaaaacatcttttttacatgaaggagctgtgtatcatttgaaattactcaaatgatgtcttgctctgaggcataaatcccaggtacttagtgtttttaataatatggtgccactgcaggatttgggggcggtggggaagaacaagcataatggtagggggaggcttggcctgaaactaaccactgagtgaattgcactgcaggttttacttaacgggaattccttatttgggatgtcaagagggcagctgcaaactgaaaaacaatccagtaaatgtactttgttttatgtattgtagcaggcaattaactactaaataatagctttgacatttgcaattgttgcatagagactatttttgctagaagatgattagctcttgcctttattttacagtgcttagtgtgataaacttctagtcatgtttcctatccaagagaccagttaatatatgtacataaaccacagaaatagtataacacactatttttaaattatcgttttcctacttaaattttgtttagcttaagacttcttaggacatttgtaaaagcaggttaaatttaataaggtttctgatttttttttgtaaccggagatagtttttacaagtgaaataacatttcagctaaataaaacatcgctaaataattgatatttgatgaaaatctgctttgtataatttctgtaaattatccttgttctgaaaaaggtgtaatgccctaatatttttaaatccttatcctttgattttttaaaaactgacctattgataaaactataaattttcattttccagtgcagttagttacctttttaaacataaatgcacaacaagcaaatgaatttaagagaactaaactggaataagtgttcataaatgaaacccttggactatttaataaagttgaaatgtgaattaaggaaaacttttgttaataaaaactttcttttaaaaaaaa

SEQ ID NO: 1450 - protein, 211 aa, Homo sapien
MKIWTSEHVFDHPWETVTTAAMQKYPNPMNPSVVGVDVLDRHIDPSGKLHSHRLLSTEWGLPSIVKSLIGAARTKTYVQEHSVVDPVEKTMELKSTNISFTNMVSVDERLIYKPHPQDPEKTVLTQEAIITVKGVSLSSYLEGLMASTISSNASKGREAMEWVIHKLNAEIEELTASARGTIRTPMAAAAFCREVIVTVGRQHRVLQVSPN

SEQ ID NO: 1451 - DNA, 2944 bp, Homo sapien
atatgatccgctcggcttcctgggtctggctgctgccgcccgccggtgtccgcccgtgtcgcgccggggcaccaaggagccgttggagggtccgggcggaggcccgctcgtgtggaagtcgtcgacgccgccgctcgtccgtcctcccgtccgttctcgctcccggccgccatcatgctggcgctcatctcccgcctgctggactggttccgttcgctcttctggaaggaagagatggagctgacgctcgtggggctgcagtactcgggcaagaccaccttcgtcaatgtcatcgcgtcaggtcaattcagtgaagatatgatacccacagtgggcttcaacatgaggaaggtaactaaaggtaacgtcacaataaagatctgggacataggaggacaaccccgatttcgaagcatgtgggagcggtattgcagaggagtcaatgctattgtttacatgatagatgctgcagatcgtgaaaagatagaagcttcccgaaatgagctacataatcttctagataaaccacagttacaaggaattccagtgctagtgcttggaaacaagagagatcttcctaatgccttggatgagaaacagctaattgaaaaaatgaatctgtctgctattcaggatagagaaatttgctgctattcaatttcttgcaaagaaaaggataatatagatatcacacttcagtggcttattcagcattcaaaatctagaagaagctgaagcatctcttgaagtcttccagtccttcttggctataatcctagaattattgtccgttcctctgaagtaattcccagaatacggtccttcctaaaccccagaaattgcctttttcagagtctatttctcatgtgcactgctgaagatgaatatccctaatccttcataaagaatcagctagagttgtcatgataaagtcagcacacacaaaaaggcttcttacacataccaaaaaaaatgtcttaaaccatgtgtagagctttaaaaacagaaaaaaaaccccatatacttatgaccatcttaaatcaagaaaattgcatatttccattctggtctttctgggccagatttttatattggttttcagtaaatgtctatctataatatttcattatagagtccagtagcttaatactgacactgacttgatacagcacgaagtttctagtgccacacacagtatttagaaaacctttaggcgtgaatgactcatgtgggatatatgtaaacataatgtttattttatctcacaaatgcatgtgaaatgtataattacatcttaggaatccaaaatggtctgcagagagtgagcggaggcaccagatcaatgttggttctttgcactggtgagattctgcctgatgaatattaaagatatcctgctttctgagaactctatcaccagatggcagttgggatatgggaggaactaaagcatcctgttttgtatctgtccagatcattatttctgtctcttgttttttcttcctggttcaggatacttttttaaggggttgagaattgaagattttccaaaagcgttcatgaatttagagcattccacccaatataataaaacctgttaagaatgtcagtctttgttcaaacatctgtttgttctatctccagtcattaaatcagtgctgctgcatgacactcttaactcctgactttttatatccagtcataaagttgactttcagcacaaaagatacttataaacaaataaaaaatttttatttttctctcttactgatgtaagctttggcactcttttgactggtgccattagacatcttgattattgtgacaactctagacctgcctgctttatctaatgtaatcatgctcaatgtctacaggttgtttaataatcagtcacacagagaactgaggaactgatgctgtttgtttgcttctatgatacagagatgtctaaaaacttcaaatggacatgttttgtagtttagcgacttccgtatacataaagggacatattaatactggttcatttgtaaattattattcatatagaccactgtagtagataaaactctatggtacacctgcttatgtgttgcctcacactgtgtgtgattttgtttcttttgttaagcagcacttatgtagactgcatttccaaatgtgttgagcactcggagtgtagtcaacagtaagttcttttaatgaatatcagttttaatttatagactgccatggccttaaaaatattctgtacaatatactgcactgtgttgcacagacactacttgcttttctccattcatatttttatgagtagaatctgggcttttaaatttctcttcttattctttgaagcatgttgcatactaccctggtgggatggatggttctgtaaatgaagggatatttaaacttgctactgttgttcaacaccattaatggtcagtgtgaaccattacaaagaatgtggcaacttgcttgtgcctaaaaggaggaattggaactagaatgtgtgactctgtggggactgcataggtttgttaattgacctatagctaaaccttaatgtgtttgtgtgtctatacattgctttccgcatttcaagacatccagacgctattaccaacattttcctgtgcattaacctctgcatgtgaaaacttttaacagttactgaactatgtaaatatgtgaatttttttatttaggtggatgcattttttgtctgtttactgctcttctcagctttattcaataaacttgcattttaagggttgtattggcaattttaacttaaaatgtgcatcatgatggaaggtgcagacttttttggaagtttccgagaggagggtctatagaccatttgtcagaaatcagatcagccctcaaagaatggggtctgtgggctagttaaaatagaaataaacttttaaaatatccacag

SEQ ID NO: 1452 - protein, 186 aa, Homo sapien
MLALISRLLDWFRSLFWKEEMELTLVGLQYSGKTTFVNVIASGQFSEDMIPTVGFNMRKVTKGNVTIKIWDIGGQPRFRSMWERYCRGVNAIVYMIDAADREKIEASRNELHNLLDKPQLQGIPVLVLGNKRDLPNALDEKQLIEKMNLSAIQDREICCYSISCKEKDNIDITLQWLIQHSKSRRS

SEQ ID NO: 1453 - DNA, 4020 bp, Homo sapien
gtcaattgccctttagtcccaggactaaccggaagcttctgcaacaggaggacattgaaaataagatggaacccatccacataaggatttgcctcaaagggcactgcaaaaattgaacagaggaatcccaaggaagctgcctgaatttgcctgtatactctcgttctgcgacttataaaggaccagacaaatcaaattagtggttttggtttccgccagctgtggatgcctttgacattatgaccgcagaggattccaccgcagccatgagcagtgactcggccgccgggtcctcggccaaggtgcccgagggcgtggcgggcgcgcccaacgaggcagcactgctggcgctgatggagcgcacgggctacagcatggtgcaagagaacgggcagcgcaagtacggcggcccaccgcccggctgggagggcccgcacccgcagcgtggctgcgaggtcttcgtgggcaagatcccgcgcgacgtgtacgaggacgagctggtgcccgtgttcgaggccgtgggccgcacctacgagctgcgcctcatgatggactttgacggcaagaaccgcggctacgccttcgtcatgtactgccacaagcacgaggccaagcgcgcagtgcgtgagctcaacaactacgagatccgcccgggccgcctgctcggcgtgtgctgcagcgtggacaactgccgcctcttcatcggcgggatccccaagatgaagaagcgcgaggaaatcctggaggagattgccaaggtcaccgagggcgtgctggacgtgatcgtctacgccagcgcggccgacaagatgaagaaccgcggcttcgccttcgtggagtacgagagccaccgcgcggctgccatggctcgccgcaagctcatgcctggccgcatccagctgtggggccaccagatcgccgtggactgggccgagcctgagatcgacgtggacgaggacgtgatggagaccgtgaagatcctctacgtgcgcaacctcatgatcgagaccaccgaggacaccatcaagaagagcttcggccagttcaaccccggctgcgtggagcgcgtcaagaagatccgcgactacgccttcgtgcacttcaccagccgcgaggatgccgtgcatgccatgaacaacctcaacggcactgagctggagggctcgtgcctggaggtcacgctggccaagcccgtggacaaggagcagtactcgcgctaccagaaggcagccaggggcggcggcgcggctgaggcagcgcagcagcccagctacgtgtactcctgcgacccctacacactggcctactacggctacccctacaacgcgctcattgggcccaacagggactactttgtgaaagtagccatccctgccattggggctcagtattccatgtttccagcagctccagcccctaaaatgattgaagatggcaaaatccacacagtggagcacatgatcagccccattgctgtgcagccagacccagccagtgctgctgccgccgcagccgcggccgcagccgccgcagccgctgtcattcccactgtgtcgacgccaccacctttccagggccgcccaataactccagtatacacggtggctccaaacgttcagagaattcctactgccgggatctacggggccagttacgtgccatttgctgctccagctacagccacgatcgccacactacagaagaacgcggcagccgcggccgccgtgtatggaggatacgcaggctacatacctcaggccttccctgctgctgccattcaggtccccatccccgacgtctaccagacatactgaggctggtgaccagcacgaagacagaccacacaaacaccactgaaggaacgcttgactatttatgaagaaggaacatgttggattcacacatgcaacctgaaagtgaagaatgttagcagatttatttctgaattattttatatacatgaagttttcactagttttttaagactattttcaacttagcatgcctacgttcatacatttccaaaagacttgcaatggttcgtgccttcattccatcttttaaaaatttgtatgctgtactacatttgtatagaggtttttgttgttgtttttttaaggatatattttcagtatgaaggttattttcttaacttctgcactccagagatttctattttgtagtaccttcaataatatatcaactatatattaaaaaagcacacttgaggagctagggaactattttgaaaaatatatacaatatttaaagatacaaacagtagtgcttaaaaatactacataaagcattattttaaaggttatactggaaagtgcaattttaaaatgagtaaaacctctgtatttctgctggcattaagggttgatggtgttaccatgtatcatcatggcggtactattttttaaaagaaattaaacactggatctctccttaagccaacattgaaaagacttgccgcacttctgagtccaaacactggaaagctctccttgccaccgttagccggggctcattctccatgtgccttagccttaaacatgcccccactcccacatctctcaccctgtcccctcctccccagattcccaatcccaccgcaatgtttggcaagcctaggactgataagtagctctgatagaggagctggtggcttttatacttcttcctgggtttttgttggggtttgttgtttcgttgttttttgttttttttttgtttggttggggaagtattgtcttctacgtgtgctattttcagtagcagagtaagcacaaggttttaatcgagttgcataagacacctttgcatagctatttaattgcccaatgtaaaactttaatgccatttctaatgcttttattcatttttgaagtatgagtttgtagggacaaagaatgtatgttatcgtagacaagacccccagagactcttttcagcagaaagttatgcttctagttgccttaccatgtttcttgcaaaactgtccatggtcctcaagggtgttggaaacattatgtttattaaatgggcctctcttcctttgctgtgcacttgatgggtgaactggattggggtgtgcacatccaggaggaggaggagagacctgtagaagtttaaagatagtttgtaaatatcttctaatgcttgtttttagtccttttatgttggagaagttcatggtatgtagtttaatgcaaaatgaaaccattttatttcaatgttattaaaaaggtttgttttattaggaagttaatgtattgttgcagtgttttgtgcctgtttaaaggcttttgtttagcagagtgaatgtaaaatacagtaaaatgttaagattgtcatctactttttaaaaaaaaatatcaacttggaattgttttttaaaggctcaatcaaggaagtgaggtgtgcaataaggtagcaagtaaaacgcagttgcgtttttatgtcatgttagagatccatacaattttccactcacgggatttttgttgatggctgaattcttgtggattcataagaggatcatgcccttagcaagtacttttgttttgttttaaattaagagattcccaaatgcctttttccccctcatcttgaaatgagatgagtttttatgtgtaagcaatatttatttaactattctataaaattattgagtgcctactgaggcctttaagcaccgctaacattcctttccatcattcttttgaatgacataaaataattgtgcaatgttcctgatgatgtaccccacagctgcattcaaactcaaatctgtgggaatgagtgactcgaccaaatgtaattcggatcagatcctcatcccctgactgtgtgaaaaaagtactctccttctagtgaaggattgtcacagagtttcactggatgaaactatgacccagtattcttactgtattttacatgtgcctgtaaattattttgccgaaataagaagaagaagaggaagaaagaacagtagaaaaaaaaaataaaaaaaaa

SEQ ID NO: 1454 - protein, 524 aa, Homo sapien
MTAEDSTAAMSSDSAAGSSAKVPEGVAGAPNEAALLALMERTGYSMVQENGQRKYGGPPPGWEGPHPQRGCEVFVGKIPRDVYEDELVPVFEAVGRTYELRLMMDFDGKNRGYAFVMYCHKHEAKRAVRELNNYEIRPGRLLGVCCSVDNCRLFIGGIPKMKKREEILEEIAKVTEGVLDVIVYASAADKMKNRGFAFVEYESHRAAAMARRKLMPGRIQLWGHQIAVDWAEPEIDVDEDVMETVKILYVRNLMIETTEDTIKKSFGQFNPGCVERVKKIRDYAFVHFTSREDAVHAMNNLNGTELEGSCLEVTLAKPVDKEQYSRYQKAARGGGAAEAAQQPSYVYSCDPYTLAYYGYPYNALIGPNRDYFVKVAIPAIGAQYSMFPAAPAPKMIEDGKIHTVEHMISPIAVQPDPASAAAAAAAAAAAAAAVIPTVSTPPPFQGRPITPVYTVAPNVQRIPTAGIYGASYVPFAAPATATIATLQKNAAAAAAVYGGYAGYIPQAFPAAAIQVPIPDVYQTY

SEQ ID NO: 1455 - DNA, 1753 bp, Homo sapien
agacggaagtgcgggcggaggatccccagccgggtcccaagcctgtgcctgagcctgagcctgagcctgagcccgagccgggagccggtcgcgggggctccgggctgtgggaccgctgggcccccagcgatggcgaccctgtggggaggccttcttcggcttggctccttgctcagcctgtcgtgcctggcgctttccgtgctgctgctggcgcagctgtcagacgccgccaagaatttcgaggatgtcagatgtaaatgtatctgccctccctataaagaaaattctgggcatatttataataagaacatatctcagaaagattgtgattgccttcatgttgtggagcccatgcctgtgcgggggcctgatgtagaagcatactgtctacgctgtgaatgcaaatatgaagaaagaagctctgtcacaatcaaggttaccattataatttatctctccattttgggccttctacttctgtacatggtatatcttactctggttgagcccatactgaagaggcgcctctttggacatgcacagttgatacagagtgatgatgatattggggatcaccagccttttgcaaatgcacacgatgtgctagcccgctcccgcagtcgagccaacgtgctgaacaaggtagaatatgcacagcagcgctggaagcttcaagtccaagagcagcgaaagtctgtctttgaccggcatgttgtcctcagctaattgggaattgaattcaaggtgactagaaagaaacaggcagacaactggaaagaactgactgggttttgctgggtttcattttaataccttgttgatttcaccaactgttgctggaagattcaaaactggaagcaaaaacttgcttgatttttttttcttgttaacgtaataatagagacatttttaaaagcacacagctcaaagtcagccaataagtcttttcctatttgtgacttttactaataaaaataaatctgcctgtaaattatcttgaagtcctttacctggaacaagcactctctttttcaccacatagttttaacttgactttcaagataattttcagggtttttgttgttgttgttttttgtttgtttgttttggtgggagaggggagggatgcctgggaagtggttaacaacttttttcaagtcactttactaaacaaacttttgtaaatagaccttaccttctattttcgagtttcatttatattttgcagtgtagccagcctcatcaaagagctgacttactcatttgacttttgcactgactgtattatctgggtatctgctgtgtctgcacttcatggtaaacgggatctaaaatgcctggtggcttttcacaaaaagcagattttcttcatgtactgtgatgtctgatgcaatgcatcctagaacaaactggccatttgctagtttactctaaagactaaacatagtcttggtgtgtgtggtcttactcatcttctagtacctttaaggacaaatcctaaggacttggacacttgcaataaagaaattttattttaaacccaagcctccctggattgataatatatacacatttgtcagcatttccggtcgtggtgagaggcagctgtttgagctccaatgtgtgcagctttgaactagggctggggttgtgggtgcctcttctgaaaggtctaaccattattggataactggcttttttcttcctctgtcctctttggaatgtaacaataaaaataatttttgaaacatcc

SEQ ID NO: 1456 - protein, 198 aa, Homo sapien
MATLWGGLLRLGSLLSLSCLALSVLLLAQLSDAAKNFEDVRCKCICPPYKENSGHIYNKNISQKDCDCLHVVEPMPVRGPDVEAYCLRCECKYEERSSVTIKVTIIIYLSILGLLLLYMVYLTLVEPILKRRLFGHAQLIQSDDDIGDHQPFANAHDVLARSRSRANVLNKVEYAQQRWKLQVQEQRKSVFDRHVVLS

SEQ ID NO: 1457 - DNA, 3443 bp, Homo sapien
gagcaacctcagcttctagtatccagactccagcgccgccccgggcgcggaccccaaccccgacccagagcttctccagcggcggcgcagcgagcagggctccccgccttaacttcctccgcggggcccagccaccttcgggagtccgggttgcccacctgcaaactctccgccttctgcacctgccacccctgagccagcgcgggcgcccgagcgagtcatggccaacgcggggctgcagctgttgggcttcattctcgccttcctgggatggatcggcgccatcgtcagcactgccctgccccagtggaggatttactcctatgccggcgacaacatcgtgaccgcccaggccatgtacgaggggctgtggatgtcctgcgtgtcgcagagcaccgggcagatccagtgcaaagtctttgactccttgctgaatctgagcagcacattgcaagcaacccgtgccttgatggtggttggcatcctcctgggagtgatagcaatctttgtggccaccgttggcatgaagtgtatgaagtgcttggaagacgatgaggtgcagaagatgaggatggctgtcattgggggtgcgatatttcttcttgcaggtctggctattttagttgccacagcatggtatggcaatagaatcgttcaagaattctatgaccctatgaccccagtcaatgccaggtacgaatttggtcaggctctcttcactggctgggctgctgcttctctctgccttctgggaggtgccctactttgctgttcctgtccccgaaaaacaacctcttacccaacaccaaggccctatccaaaacctgcaccttccagcgggaaagactacgtgtgacacagaggcaaaaggagaaaatcatgttgaaacaaaccgaaaatggacattgagatactatcattaacattaggaccttagaattttgggtattgtaatctgaagtatggtattacaaaacaaacaaacaaacaaaaaacccatgtgttaaaatactcagtgctaaacatggcttaatcttattttatcttctttcctcaatataggagggaagattttaccatttgtattactgcttcccattgagtaatcatactcaaatgggggaaggggtgctccttaaatatatatagatatgtatatatacatgtttttctattaaaaatagacagtaaaatactattctcattatgttgatactagcatacttaaaatatctctaaaataggtaaatgtatttaattccatattgatgaagatgtttattggtatattttctttttcgtccttatatacatatgtaacagtcaaatatcatttactcttcttcattagctttgggtgcctttgccacaagacctagcctaatttaccaaggatgaattctttcaattcttcatgcgtgcccttttcatatacttattttattttttaccataatcttatagcacttgcatcgttattaagcccttatttgttttgtgtttcattggtctctatctcctgaatctaacacatttcatagcctacattttagtttctaaagccaagaagaatttattacaaatcagaactttggaggcaaatctttctgcatgaccaaagtgataaattcctgttgaccttcccacacaatccctgtactctgacccatagcactcttgtttgctttgaaaatatttgtccaattgagtagctgcatgctgttcccccaggtgttgtaacacaactttattgattgaatttttaagctacttattcatagttttatatccccctaaactacctttttgttccccattccttaattgtattgttttcccaagtgtaattatcatgcgttttatatcttcctaataaggtgtggtctgtttgtctgaacaaagtgctagactttctggagtgataatctggtgacaaatattctctctgtagctgtaagcaagtcacttaatctttctacctcttttttctatctgccaaattgagataatgatacttaaccagttagaagaggtagtgtgaatattaattagtttatattactctcattctttgaacatgaactatgcctatgtagtgtctttatttgctcagctggctgagacactgaagaagtcactgaacaaaacctacacacgtaccttcatgtgattcactgccttcctctctctaccagtctatttccactgaacaaaacctacacacataccttcatgtggttcagtgccttcctctctctaccagtctatttccactgaacaaaacctacgcacataccttcatgtggctcagtgccttcctctctctaccagtctatttccattctttcagctgtgtctgacatgtttgtgctctgttccattttaacaactgctcttacttttccagtctgtacagaatgctatttcacttgagcaagatgatgtatggaaagggtgttggcactggtgtctggagacctggatttgagtcttggtgctatcaatcaccgtctgtgtttgagcaaggcatttggctgctgtaagcttattgcttcatctgtaagcggtggtttgtaattcctgatcttcccacctcacagtgatgttgtggggatccagtgagatagaatacatgtaagtgtggttttgtaatttgaaaagtgctatactaagggaaagaattgaggaattaactgcatacgttttggtgttgcttttcaaatgtttgaaaataaaaaaatgttaagaaatgggtttcttgccttaaccagtctctcaagtgatgagacagtgaagtaaaattgagtgcactaaacgaataagattctgaggaagtcttatcttctgcagtgagtatggcccaatgctttctgtggctaaacagatgtaatgggaagaaataaaagcctacgtgttggtaaatccaacagcaagggagatttttgaatcataataactcataaggtgctatctgttcagtgatgccctcagagctcttgctgttagctggcagctgacgctgctaggatagttagtttggaaatggtacttcataataaactacacaaggaaagtcagccaccgtgtcttatgaggaattggacctaataaattttagtgtgccttccaaacctgagaatatatgcttttggaagttaaaatttaaatggcttttgccacatacatagatcttcatgatgtgtgagtgtaattccatgtggatatcagttaccaaacattacaaaaaaattttatggcccaaaatgaccaacgaaattgttacaatagaatttatccaattttgatctttttatattcttctaccacacctggaaacagaccaatagacattttggggttttataatgggaatttgtataaagcattactctttttcaataaattgttttttaatttaaaaaaaggaaaaaaaaaaaaaaaaa

SEQ ID NO: 1458 - protein, 211 aa, Homo sapien
MANAGLQLLGFILAFLGWIGAIVSTALPQWRIYSYAGDNIVTAQAMYEGLWMSCVSQSTGQIQCKVFDSLLNLSSTLQATRALMVVGILLGVIAIFVATVGMKCMKCLEDDEVQKMRMAVIGGAIFLLAGLAILVATAWYGNRIVQEFYDPMTPVNARYEFGQALFTGWAAASLCLLGGALLCCSCPRKTTSYPTPRPYPKPAPSSGKDYV

SEQ ID NO: 1459 - DNA, 2684 bp, Homo sapien
aataacctggagccggcggcgtaggttggctctttagggcttcaccccgaagctccaccttcgctcccgtctttctggaaacaccgctttgatctcggcggtgcgggacaggtacctcccggctgctgcgggtgccctggatccagtcggctgcaccaggcgagcgagacccttccctggtggaggctcagagttccggcagggtgcatccggcctgtgtgtggcgcgaggcagggaagccggtacccgggtcctggccccagcgctgacgttttctctcccctttcttctctcttcgcggttgcggcgtcgcagacgctagtgtgagcccccatggcagatacgaccccgagcggcccccaaggggcgggcgctgtgcaattcatgatgaccaataaactggacacggcaatgtggctttctcgcttgttcacagtttactgctctgctctgtttgttctgcctcttcttgggttgcatgaagcagcaagcttttaccaacgtgctttgctggcaaatgctcttaccagtgctctgaggctgcatcaaagattaccacacttccagttaagcagagcattcctggcccaggctttgttagaggacagctgccactacctgttgtattcactcatctttgtaaattcctatccagttacaatgagtatcttcccagtcttgttattctctttgcttcatgctgccacatatacgaaaaaggtccttgacgcaaggggctcaaatagtttacctctgctgagatctgtcttggacaaattaagtgctaatcaacaaaatattctgaaattcattgcttgcaatgaaatattcctgatgcctgcgacagtttttatgctttttagtggtcaaggaagtttgctccaaccttttatatactatagatttcttacccttcgatattcgtctcgaagaaacccatattgtcggaccttatttaatgaactgaggattgttgttgaacacataataatgaaacctgcttgcccactgtttgtgagaagactttgtctccagagcattgcctttataagcagattggcaccaacagttccatagtttaacatctagttaagctacaaatatagtataagcattattagcagctggtacttctgctaggggttgtaaattccaggtgttacactgacctcaatccaatttacataatttacataaatgcatctcggtggaaaaataatcattttcttggcatgttaaatcaagcttaaaaagttttgagaaaattttactgtgctgtgttgctaatggttaaagaagtctgtatctagtgataaatataccagtttttttaaaaagatgctgttgtgcctatatcatgaagtacattaatttctcatgtaaaaaaaatagctctaaaatttgtttcaacctaattggtaacctgagtttatatctggcatgaattcattatggtgatacacatatgtgaattcagtacattttgagacagtattctaccattcagtaattttggttaatgattttaacacttctcagtgtatttaatttcaaattgtttttttaattggttttatgctgctttgttaggacagatgtgttttgaatgtaccattataagaagaattctatgtatcttaaactatgatcttctaaaattttatttccgtaagtacttctgtggccttgagtattttttaaaaggctcaactgtaagcctcttagccagttggataaatatttggggtcacctagccattgaaagcagaaagcagtagtgacacagctttcccttcaaagagccattgagaaacatttctcaaacaggaaatccttcttttactaatgtggacatatagattattcgtattatagtttgtagaactacctagttcagaatcttgactgccagttttcttggtttcttaggcttgaattttcatagacaattgcaacagtttagatgccttttgaaaggaatgtaatgaagattcagcatctgactatatgtgtgtctatcctgaaataataatggagagtatactgtagattacatgtttacccatcaaatctgacttaaaaggttaaatggaaggttttataggtaaggtaattgattgggaatggggtagggggaggagttgtgggggaataatgtgcatttcagtctcaacgcatagataaatttaggggaattggatgcattattcaactttgatttgggttgtaaaatgtgttaaatcctgttcattgaactcccatcaactcttatgaaattcatgctgatcttcattaccgttgcatgattggaaatgtttaaaacattgtacagttttagtatagagaaatgtaatggtttttgtgaccagtttctgtctgcatgtaatttggatttctcaaatacattcattagtaatttatcagtaacattagttttatttttgttcatctccttatctataaaaaggggatattcttaggataaatacatgaaaaattatacttgatagcttaactataatcagctatttttgtatttttgtaatatttgtccactaagctggagaagcagcctcatacagttgattttgtgtatgtggctagtcttattgtcactatgtaagtaatccaatggttttagaaactaaactttctagagcaataaaatgactataatgttaagt

SEQ ID NO: 1460 - protein, 247 aa, Homo sapien
MADTTPSGPQGAGAVQFMMTNKLDTAMWLSRLFTVYCSALFVLPLLGLHEAASFYQRALLANALTSALRLHQRLPHFQLSRAFLAQALLEDSCHYLLYSLIFVNSYPVTMSIFPVLLFSLLHAATYTKKVLDARGSNSLPLLRSVLDKLSANQQNILKFIACNEIFLMPATVFMLFSGQGSLLQPFIYYRFLTLRYSSRRNPYCRTLFNELRIVVEHIIMKPACPLFVRRLCLQSIAFISRLAPTVP

SEQ ID NO: 1461 - DNA, 3334 bp, Homo sapien
gcacgagccccgggctgccggcgcgggcgccgcggcacgtccacaggctgggtcgcgaggtggcgatcgctgagaggcaggagggccgaggcgggcctgggaggcggcccggaggtggggcgccgctggggccggcccgcacgggcttcatctgagggcgcacggcccgcgaccgagcgtgcggactggcctcccaagcgtggggcgacaagctgccggagctgcaatgggccgcggctggggattcttgtttggcctcctgggcgccgtgtggctgctcagctcgggccacggagaggagcagcccccggagacagcggcacagaggtgcttctgccaggttagtggttacttggatgattgtacctgtgatgttgaaaccattgatagatttaataactacaggcttttcccaagactacaaaaacttcttgaaagtgactactttaggtattacaaggtaaacctgaagaggccgtgtcctttctggaatgacatcagccagtgtggaagaagggactgtgctgtcaaaccatgtcaatctgatgaagttcctgatggaattaaatctgcgagctacaagtattctgaagaagccaataatctcattgaagaatgtgaacaagctgaacgacttggagcagtggatgaatctctgagtgaggaaacacagaaggctgttcttcagtggaccaagcatgatgattcttcagataacttctgtgaagctgatgacattcagtcccctgaagctgaatatgtagatttgcttcttaatcctgagcgctacactggttacaagggaccagatgcttggaaaatatggaatgtcatctacgaagaaaactgttttaagccacagacaattaaaagacctttaaatcctttggcttctggtcaagggacaagtgaagagaacactttttacagttggctagaaggtctctgtgtagaaaaaagagcattctacagacttatatctggcctacatgcaagcattaatgtgcatttgagtgcaagatatcttttacaagagacctggttagaaaagaaatggggacacaacattacagaatttcaacagcgatttgatggaattttgactgaaggagaaggtccaagaaggcttaagaacttgtattttctctacttaatagaactaagggctttatccaaagtgttaccattcttcgagcgcccagattttcaactctttactggaaataaaattcaggatgaggaaaacaaaatgttacttctggaaatacttcatgaaatcaagtcatttcctttgcattttgatgagaattcattttttgctggggataaaaaagaagcacacaaactaaaggaggactttcgactgcattttagaaatatttcaagaattatggattgtgttggttgttttaaatgtcgtctgtggggaaagcttcagactcagggtttgggcactgctctgaagatcttattttctgagaaattgatagcaaatatgccagaaagtggacctagttatgaattccatctaaccagacaagaaatagtatcattattcaacgcatttggaagaatttctacaagtgtgaaagaattagaaaacttcaggaacttgttacagaatattcattaaagaaaacaagctgatatgtgcctgtttctggacaatggaggcgaaagagtggaatttcattcaaaggcataatagcaatgacagtcttaagccaaacattttatataaagttgcttttgtaaaggagaattatattgttttaagtaaacacatttttaaaaattgtgttaagtctatgtataatactactgtgagtaaaagtaatactttaataatgtggtacaaattttaaagtttaatattgaataaaaggaggattatcaaattcatatatgataaaagtgaatgttctaagtctctcaaactagcgttttatgtaataatatgtaatataaataaaactatggtaaatgtgacaagcatttaataggaaaatgctaaggaggcctcataaatgacccataattaccaacgtagaatttttcagtacatttagggttgctggatttagcaaataaaaataaagattgcccagttagatttgaatttcagataaacaattagttttttaatattttacatggaatatttggaaaatacttatactaaaaaattatttgtttgaaattcacatttaactgggagtcttgtattttatctggcaatcctaaaatacattggtatgaaacaaatcacttttagaagtatattgctattttgattgggttgtttttgtgtgtagaaacgtacaataacaactcaaaggcacaggagatttctaaacattgtgaaaagttgaatagattatatatttattctcataatactttcactaatactaaataaaatttggggaacactttttatttttatataatttccaatttacagaaaagtttcaaaaatagtacaaagagctctcttacccagattcactaattgttcatacgtgctttatctttcatgctttctctgtacacacacacacacacacaaatttttcctcaatcatttgaaagtcagttataggcatcatgccccttaaaccctaaatacttcagtgtgtaatactgaataattactaaaaatgattttctcagaaaaaaaaactcccacaattctggaactataatactgtaagccttagaataaataatactttcaagttccaatctaaagttctttttgagttttgttgcccgttttatgcttgatgtgtatagtaatagggtaggctatttattttattaaaattttttttagagacaaggttttgctgtgttgcccaagctggaacttgaacgactgggctgaagtgatcttcccacctcagcctcccaagtagctgggaatacaggtgtctgccaccatacccagtttcatttttgttttttatacccgaagttcatttcctttgtctccctaaaactgaactgtaattttgggaggttttcattagtggaagctcttcatttataaagctatttgaaggggtttaggaatttatatcacatggtaattgtagagaaaaagaagctatatacctcaaaatcgtgccctctttacatatgtcttatcaggtataacatgttgaaatgtcacattagtagtaaagtggggtttatttatatagtggttaagaaatgtcagtttacactgctgtatacttcttcttctgtgtccctaaggcctggtacagtgccaagcacatacttggtatccaataaatatttgttggatgaaaaaaaaaaaaaaaaaaaa

SEQ ID NO: 1462 - protein, 468 aa, Homo sapien
MGRGWGFLFGLLGAVWLLSSGHGEEQPPETAAQRCFCQVSGYLDDCTCDVETIDRFNNYRLFPRLQKLLESDYFRYYKVNLKRPCPFWNDISQCGRRDCAVKPCQSDEVPDGIKSASYKYSEEANNLIEECEQAERLGAVDESLSEETQKAVLQWTKHDDSSDNFCEADDIQSPEAEYVDLLLNPERYTGYKGPDAWKIWNVIYEENCFKPQTIKRPLNPLASGQGTSEENTFYSWLEGLCVEKRAFYRLISGLHASINVHLSARYLLQETWLEKKWGHNITEFQQRFDGILTEGEGPRRLKNLYFLYLIELRALSKVLPFFERPDFQLFTGNKIQDEENKMLLLEILHEIKSFPLHFDENSFFAGDKKEAHKLKEDFRLHFRNISRIMDCVGCFKCRLWGKLQTQGLGTALKILFSEKLIANMPESGPSYEFHLTRQEIVSLFNAFGRISTSVKELENFRNLLQNIH

SEQ ID NO: 1463 - DNA, 2976 bp, Homo sapien
ggctaatgcacagacatgaacatctattgaggaaaaccacaaaaaacttcaaaacagctacaacggtatcctaagaatatttcaattaaatattagtatgtctgctgaaggcactaattattaagaaacttaaaattatcaatctttcttgaatttctgatagagaagtaaaactattttccaaaactatttttcagaatgttcactgatacataaaaactgctagcatctaattaaagatcactaagggttaaatactgttctctggcccttactgcgcacaccctgccaaaacatcctctaagcttttaaatattgcttcgatggtctgaatttttatttccagggaaaaagagagttttgtcccacagtcagcaggccactagtttattaacttccagtcaccttgatttttgctaaaatgaagactctgcagtctacacttctcctgttactgcttgtgcctctgataaagccagcaccaccaacccagcaggactcacgcattatctatgattatggaacagataattttgaagaatccatatttagccaagattatgaggataaatacctggatggaaaaaatattaaggaaaaagaaactgtgataatacccaatgagaaaagtcttcaattacaaaaagatgaggcaataacaccattacctcccaagaaagaaaatgatgaaatgcccacgtgtctgctgtgtgtttgtttaagtggctctgtatactgtgaagaagttgacattgatgctgtaccacccttaccaaaggaatcagcctatctttacgcacgattcaacaaaattaaaaagctgactgccaaagattttgcagacatacctaacttaagaagactcgattttacgggaaatttgatagaagatatagaagatggtactttttcaaaactttctctgttagaagaactttcacttgctgaaaatcaactactaaaacttccagttcttcctcccaagctcactttatttaatgcaaaatacaacaaaatcaagagtaggggaatcaaagcaaatgcattcaaaaaactgaataacctcaccttcctctacttggaccataatgccctggaatccgtgcctcttaatttaccagaaagtctacgtgtaattcatcttcagttcaacaacatagcttcaattacagatgacacattctgcaaggctaatgacaccagttacatccgggaccgcattgaagagatacgcctggagggcaatccaatcgtcctgggaaagcatccaaacagttttatttgcttaaaaagattaccgatagggtcatacttttaacctctattggtacaacatataaatgaaagtacacctacactaatagtctgtctcaacaatgtgtaaaggaacttaagtattggtttaatattaaccttgtatctcattttgaaggaatttaatattttaagcaaggatgttcaaaatcttacatataataagtaaaaagtaagactgaatgtctacgttcgaaacaaagtaatatgaaaatatttaaacagcattacaaaatcctagtttatactagactaccatttaaaaatcatgtttttatataaatgcccaaatttgagatgcattattcctattactaatgatgtaagtacgaggataaatccaagaaactttcaactctttgcctttcctggcctttactggatcccaaaagcatttaaggtacatgttccaaaaactttgaaaagctaaatgtttcccatgatcgctcattcttcttttatgattcatacgttattccttataaagtaagaactttgttttcctcctatcaaggcagctattttattaaatttttcacttagtctgagaaatagcagatagtctcatatttaggaaaactttccaaataaaataaatgttattctctgataaagagctaatacagaaatgttcaagttattttactttctggtaatgtcttcagtaaaatattttctttatctaaatattaacattctaagtctaccaaaaaaagttttaaactcaagcaggccaaaaccaatatgcttataagaaataatgaaaagttcatccatttctgataaagttctctatggcaaagtctttcaaatacgagataactgcaaaatattttccttttatactacagaaatgagaatctcatcaataaattagttcaagcataagatgaaaacagaatattctgtggtgccagtgcacactaccttcccacccatacacatccatgttcactgtaacaaactgaatattcacaataaagcttctgagtaacactttctgattactcatgataaactgacatggctaactgcaagaattaaatcttctatctgagagtaataatttatgatgactcagtggtgccagagtaaagtttctaaaataacattcctctcacttgtaccccactaaaagtattagtctacacattacattgaagttaaacacaaaattatcagtgttttagaaacatgagtccggactgtgtaagtaaaagtacaaacattatttccaccataaagtatgtattgaaatcaagttgtctctgtgtacagaatacatacttattcccatttttaagcatttgcttctgttttccctacctagaatgtcagatgtttttcagttatctccccatttgtcaaagttgacctcaagataacatttttcattaaagcatctgagatctaagaacacaattattattctaacaatgattattagctcattcacttattttgataactaatgatcacagctattatactactttctcgttattttgtgtgcatgcctcatttccctgacttaaacctcactgagagcgcaaaatgcagctttatactttttactttcaattgcctagcacaatagtgagtacatttgaattgaatatataataaatattgcaaaataaaatccaaaaaaaaaaaaaaaaa

SEQ ID NO: 1464 - protein, 298 aa, Homo sapien
MKTLQSTLLLLLLVPLIKPAPPTQQDSRIIYDYGTDNFEESIFSQDYEDKYLDGKNIKEKETVIIPNEKSLQLQKDEAITPLPPKKENDEMPTCLLCVCLSGSVYCEEVDIDAVPPLPKESAYLYARFNKIKKLTAKDFADIPNLRRLDFTGNLIEDIEDGTFSKLSLLEELSLAENQLLKLPVLPPKLTLFNAKYNKIKSRGIKANAFKKLNNLTFLYLDHNALESVPLNLPESLRVIHLQFNNIASITDDTFCKANDTSYIRDRIEEIRLEGNPIVLGKHPNSFICLKRLPIGSYF

SEQ ID NO: 1465 - DNA, 1315 bp, Homo sapien
ctatgatgatttgtagggtggcacctttttatccaagttactagctacacatcagtgtttaaagagaaaaaagtgacctttcattttttttttcttgaaacttgaggaaacaagatacatactactgatttttttttttcttaaaactaaatgcatgactgcagagcggtagaggtgtatatttttcatactgtggggcaaagtatttgtgctgctttttggagatggactggaacgtctggtttctgtccccgggcccggcagctacgtctattttctgtagaaggtgccacagtgagacctggagccaccccttcctgccctggcgccgtttagagctgggagcccgtggactcccggcctgtttctaccttctattcaaccactctgacgtggggagacaagaagaaatagaactttttgatagtgtggtaaaaacattgatttgaactattttagtaaaaggagtaacaaacaagattgtgatagtgtctactttgagctagataaataaaggcctctttgtgagcctcctggctgggtgctcagtgcttgtttctgtcgtgggtggcagggtcagcaggcagagacagggccaaggcccctcaagcaccgcagatgggggctcagtcggggccccttccacagacagagccgtggcccctcaaggtggacagtgaggccgctgctcctccagctgcctctgtctcatcacaggccagaagtggaaagggtttcaaatccaagcccccgggttcctgtgtgcgttctacgcagcaaggcttcaaagtttcaaactggtttggaactcaaccaggtcctccaaaggaaaccaaggcaggcacaggatgggggcaggctggcttggcaggcagctgtgcggatccacccagagtgccttgggaggcagtggggttggctgtggctgctgtgagctgcagccaggcctctcccgcgtccccagggtctggaaggagggcctctgcacattttataagccacagactgcgaaggcctggagccccaccttccacccataacaaagaaagggatagtttcagaactgcttttatttggataactgactgaaggagtctcatttgtaaccaagatggaattcacagtatgttgttacattcacacttaaaaaatatatctctatgtacaggaatttgcaaagagatgtaaacatacattaatttccaagtacatttctccccttctccctggaggaaaaaaaaaaagccatccaatgaggcaaccccttcaaaataattttaatacaaaggatgcaaacatcaaaaaaaaaaaaaaa

SEQ ID NO: 1466 - protein, 156 aa, Homo sapien
MGAQSGPLPQTEPWPLKVDSEAAAPPAASVSSQARSGKGFKSKPPGSCVRSTQQGFKVSNWFGTQPGPPKETKAGTGWGQAGLAGSCADPPRVPWEAVGLAVAAVSCSQASPASPGSGRRASAHFISHRLRRPGAPPSTHNKERDSFRTAFIWITD

SEQ ID NO: 1467 - DNA, 3726 bp, Homo sapien; identical to SEQ ID NO: 1295

SEQ ID NO: 1468 - protein, 543 aa, Homo sapien; identical to SEQ ID NO: 1296

SEQ ID NO: 1469 - DNA, 1529 bp, Homo sapien
atagtctacacagagctccccttgctgcccagacaagctgaaggaccacaggaaaagccatggagacttcagcatcctcctcccagcctcaggacaacagtcaagtccacagagaaacagaagatgtagactatggagagacagatttccacaagcaagacgggaaggctggactcttttcccaagaacaatatgagagaaacaagtcttcttcctcctccttctcttcctcctcatcctcctcatcttcttcatcctcctcctcctcaggtcctgggcatggggagcctgacgttttgaaggatgagcttcaactctatggagatgctcctggagaggtggtaccctctggggaatcaggactccgaaggagaggctctgacccagcaagtggagaagtggaggcctctcagttaagaagactgaatataaagaaagatgatgagtttttccatttcgtcctcctgtgctttgccatcggggccttgctggtgtgttatcactattacgcagactggttcatgtctcttggggtcggcctgctcaccttcgcctccctggaaaccgttggcatctacttcggactagtgtaccgtatccacagcgtcctccaaggcttcatccccctcttccagaagtttaggctgacagggttcaggaagactgactgaggccacttccaggtgggcagcagaggcaggccccagtgtgaccaccactgcgacccctgagcccacaagggcagagcagcattctgagagacgcacaggagaccaagccagaccaataaacagaacacttttccttccatgtggtctgaatgttggcaccagcccgggcaggggcatctcatttgggcagtactgctgtgcaacccagctgcaaggatggaaggcagagggtgggtgtggggcctgaggcttcacagtacctggaccagcaggaagattctgggaggtcactgctctcagaggacagcaagggaccctgagctctgcaagctgtgatctgtctgggttcatggtttttctcaaatcccaggctatctgcatgcgctctcaggtgctaccgagccatcctgggagagatggatggtccactgctttgaggcagggagccatcgggctggggccccttggtgaacctgatgcaggtaagatgctgaggactaaaaccattttttttgcacccaaaaaaaaaggcaggaaaatgatcatcagaaactaaatggcagccaggcatgggggctcacgactgtaatcctcgcactttgggaggctcaggctaagggtcgcttgaagctgagagttcaagaccaacctgggcaacatagtgagacccccatctctacaatttttttttaatgaccaaatgtggcggtacatacctgtacatacctgcggttccagctactcaagaggctgaggcaggaggactgcttgagcccaggagttcagggctgcagtgaggtacgatcaagccactgcactccagcctgggcgacagagcaagatcgtttctctaaaatt

SEQ ID NO: 1470 - protein, 203 aa, Homo sapien
METSASSSQPQDNSQVHRETEDVDYGETDFHKQDGKAGLFSQEQYERNKSSSSSFSSSSSSSSSSSSSSSGPGHGEPDVLKDELQLYGDAPGEVVPSGESGLRRRGSDPASGEVEASQLRRLNIKKDDEFFHFVLLCFAIGALLVCYHYYADWFMSLGVGLLTFASLETVGIYFGLVYRIHSVLQGFIPLFQKFRLTGFRKTD

SEQ ID NO: 1471 - DNA, 1813 bp, Homo sapien
attaatctggccgtgccatgcatctactccatgttcaggcttgtggagaggtacgagatgccacggcacgaagtctacgttctcctgatccgaaacatctttttgaaaatatcaatcattggcattctttgttactattggctcaacaccgtggccctgtctggtgaagagtgttgggaaaccctcattggccaggacatctaccggctccttctgatggattttgtgttctctttagtcaattccttcctgggggagtttctgaggagaatcattgggatgcaactgatcacaagtcttggccttcaggagtttgacattgccaggaacgttctagaactgatctatgcacaaactctggtgtggattggcatcttcttctgccccctgctgccctttatccaaatgattatgcttttcatcatgttctactccaaaaatatcagcctgatgatgaatttccagcctccgagcaaagcctggcgggcctcacagatgatgactttcttcatcttcttgctctttttcccatccttcaccggggtcttgtgcaccctggccatcaccatctggagattgaagccttcagctgactgtggcccttttcgaggtctgcctctcttcattcactccatctacagctggatcgacaccctaagtacacggcctggctacctgtgggttgtttggatctatcggaacctcattggaagtgtgcacttctttttcatcctcaccctcattgtgctaatcatcacctatctttactggcagatcacagagggaaggaagattatgataaggctgctccatgagcagatcattaatgagggcaaagataaaatgttcctgatagaaaaattgatcaagctgcaggatatggagaagaaagcaaaccccagctcacttgttctggaaaggagagaggtggagcaacaaggctttttgcatttgggggaacatgatggcagtcttgacttgcgatctagaagatcagttcaagaaggtaatccaagggcctgatgactcttttggtaaccagacaccaatcaaataaggggaggagacgaaaatggaatgatttcttccatgccacctgtgcctttaggaactgcccagaagaaaatccaaggctttagccaggagcggaaactgactaccatgtaattatcaaagtaaaattgggcattccatgctatttttaatacctggattgctgatttttcaagacaaaatacttggggttttccaataaagattgttgtaatattgaaatgagcctacaaaaacctaggaagagataactagggaataatgtatattatcttcaagaagtgtgtgcaggaatgattggttcttagaaatctctcctgccagacttcccagacctggcaaaggtttagaaactgttgctaagaaaagtggtccatcctgaataaacatgtaatactccagcagggatatgaagcctctgaattgtagaacctgcatttatttgtgactttgaactaaagacatcccccatgtcccaaaggtggaatacaaccagaggtctcatctctgaactttcttgcgtactgattacatgagtctttggagtcggggatggaggaggttctgcccctgtgaggtgttatacatgaccatcaaagtcctacgtcaagctagctttgcagtggcagtaccgtagccaatgagatttatccgagacgcgattattgctaattggaaattttcccaataccccaccgtgatgacttgaaatataatcagcgctggcaatttttgacagtctctacggagactgaataag

SEQ ID NO: 1472 - protein, 330 aa, Homo sapien
MFRLVERYEMPRHEVYVLLIRNIFLKISIIGILCYYWLNTVALSGEECWETLIGQDIYRLLLMDFVFSLVNSFLGEFLRRIIGMQLITSLGLQEFDIARNVLELIYAQTLVWIGIFFCPLLPFIQMIMLFIMFYSKNISLMMNFQPPSKAWRASQMMTFFIFLLFFPSFTGVLCTLAITIWRLKPSADCGPFRGLPLFIHSIYSWIDTLSTRPGYLWVVWIYRNLIGSVHFFFILTLIVLIITYLYWQITEGRKIMIRLLHEQIINEGKDKMFLIEKLIKLQDMEKKANPSSLVLERREVEQQGFLHLGEHDGSLDLRSRRSVQEGNPRA

SEQ ID NO: 1473 - DNA, 3160 bp, Homo sapien
  Unsure 1930: Unknown base
cacccgtggtgccccatccctataggagctggtgagattgcagcctgctgcctcccctccatcagccacagctattggatttcccacccagaatctttaggtaaatgagatcatgattctggaaggaggtggtgtaatgaatctcaaccccggcaacaacctccttcaccagccgccagcctggacagacagctactccacgtgcaatgtttccagtgggttttttggaggccagtggcatgaaattcatcctcagtactggaccaagtaccaggtgtgggagtggctccagcacctcctggacaccaaccagctggatgccaattgtatccctttccaagagttcgacatcaacggcgagcacctctgcagcatgagtttgcaggagttcacccgggcggcagggacggcggggcagctcctctacagcaacttgcagcatctgaagtggaacggccagtgcagtagtgacctgttccagtccacacacaatgtcattgtcaagactgaacaaactgagccttccatcatgaacacctggaaagacgagaactatttatatgacaccaactatggtagcacagtagatttgttggacagcaaaactttctgccgggctcagatctccatgacaaccaccagtcaccttcctgttgcagagtcacctgatatgaaaaaggagcaagacccccctgccaagtgccacaccaaaaagcacaacccgagagggactcacttatgggaattcatccgcgacatcctcttgaacccagacaagaacccaggattaataaaatgggaagaccgatctgagggcgtcttcaggttcttgaaatcagaggcagtggctcagctatggggtaaaaagaagaacaacagcagcatgacctatgaaaagctcagccgagctatgagatattactacaaaagagaaattctggagcgtgtggatggacgaagactggtatataaatttgggaagaatgcccgaggatggagagaaaatgaaaactgaagctgccaatactttggacacaaaccaaaacacacaccaaataatcagaaacaaagaactcctggacgtaaatatttcaaagactacttttctctgatatttatgtaccatgaggggaacaagaaactacttctaacgggaagaagaaacactacagtcgattaaaaaaattattttgttacttcgaagtatgtcctatatggggaaaaaacgtacacagttttctgtgaaatatgatgctgtatgtggttgtgattttttttcacctctattgtgaattctttttcactgcaagagtaacaggatttgtagccttgtgcttcttgctaagagaaagaaaaacaaaatcagagggcattaaatgttttgtatgttacatgatttagaaaaaggtgatgcatcctcctcacataagcatccatatggcttcgtcaagggaggtgaacattgttgctgagttaaattccagggtctcagatggttaggacaaagtggatggatgccgggaagtttaacctgagccttaggatccaatgagtggagaatggggacttccaaaacccaaggttggctataatctctgcataaccacatgacttggaatgcttaaatcagcaagaagaataatggtggggtctttatactcattcaggaatggtttatctgatsccagggctgtcttcctttctcccctttggatggttggtgaaatactytaattgcvctgtctgctcacttctasctatttaagagagaacccagcttggttcttttttgctccaagtgcttaaaaataagttggaaaaaggagacggtggtgtggaaatggctgaagagtttgctcttgtatccctatagtccaaggtttctcaatctgcacaattgacattkkkggccggagtgttctttrtddtnarggctttcctgtgcattgtaagatgttcagsagtatccactcatggtctctaaccacttgacaccagaaaccccccagctgtgataacgcaaaatstctctabacatcaccaaatkttccctggggggggcaaatttgcctttgattgagaaccaccagtttagctagtcaatatgaggatggtggtttattctcagaagaaaaagatatgtaaggtcttttagctccttagagtgaagcaaaagcaagacttcaacctcaacctatctttatgttttaaatgttagggacaataagttgaaatagctagrggvgcttctyttcagaaccccagatgagagccaatgtcagataaagtaagcatagtaatgtagcaggaacyacaatagaagacawwtwcactggmattacaaagcagaadtaaaattatattgtagaaggaaacaccaagaaaagaatttccagggaaaatcctcttttgcaggtattaattcttataattttttgtcttttggattatctgtttactgtctcatctgaactgatcccaggtgaacggtttattgcctagatttgtactcagaggaattttttttgttttgttttgtcttttaagaaaggaaagamaggatgaaaaaaataaacagaaaactcagctcaggcacaattrtcaccaaggagttaaaagcttcttctcaatmggarggwwtkkttctgggggkycykgrrrmtamcmwtgagccatgcaatctgggaagcacaggaataagtagacactttgaaaatggatttsaatgttctcatcccttttgcagcttttctttttggctctctcatgtccttggcttgctcctctattckacctctctttctccagcaataatatgcaaatgaagacatgtatccataagaaggagtgctcttcatcaactaatagagcacctaccacagtgtcatacctggtagaggtgrgcaattyatattyaaaggttgcaaagtgtttgtaatatattcatgaggctggaagtaagragaattaaaaatttktcctaattacaatgagaaccattctaggtagtgatcttggdgcacacatgaataactttctdaaggtgcaaccaaatccatttttatttctgcctgragyttgdcacctctgrggaggatggggcttagatagtatcgaatgacwattactgwgaaaaacttraraaaaragcgagggggcw

SEQ ID NO: 1474 - protein, 300 aa, Homo sapien
  Unsure 1930: Unknown amino acid
MILEGGGVMNLNPGNNLLHQPPAWTDSYSTCNVSSGFFGGQWHEIHPQYWTKYQVWEWLQHLLDTNQLDANCIPFQEFDINGEHLCSMSLQEFTRAAGTAGQLLYSNLQHLKWNGQCSSDLFQSTHNVIVKTEQTEPSIMNTWKDENYLYDTNYGSTVDLLDSKTFCRAQISMTTTSHLPVAESPDMKKEQDPPAKCHTKKHNPRGTHLWEFIRDILLNPDKNPGLIKWEDRSEGVFRFLKSEAVAQLWGKKKNNSSMTYEKLSRAMRYYYKREILERVDGRRLVYKFGKNARGWRENEN

SEQ ID NO: 1475 - DNA, 3164 bp, Homo sapien
cggcctcagaaagccgagtgaggagttggccgtagtgagagggaccgatcccttggggccgccggcggcgaggccgagccgctcctcccaatggcgaagaagacgtacgacctgcttttcaagctgctcctgatcggggattccggagtggggaagacctgcgtcctttttcgtttttcggatgatgccttcaatactacctttatttccaccataggaatagacttcaagatcaaaacagttgaattacaaggaaagaagatcaagctacagatatgggatacagcaggccaggagcgatttcacaccatcacaacctcctactacagaggcgcaatgggtatcatgctagtatatgacatcaccaatggtaaaagttttgaaaacatcagcaaatggcttagaaacatagatgagcatgccaatgaagatgtggaaagaatgttactaggaaacaagtgtgatatggacgacaaaagagttgtacctaaaggaaaaggagaacagattgcaagggagcatggtattaggttttttgagactagtgcaaaagcaaatataaacatcgaaaaggcgttcctcacgttagctgaagatatccttcgaaagacccctgtaaaagagcccaacagtgaaaatgtagatatcagcagtggaggaggcgtgacaggctggaagagcaaatgctgctgagcattctcctgttccatcagttgccatccactaccccgttttctcttcttgctgcaaaataaaccactctgtccatttttaactctaaacagatatttttgtttctcatcttaactatccaagccacctattttatttgttctttcatctgtgactgcttgctgactttatcataattttcttcaaacaaaaaaatgtatagaaaaatcatgtctgtgacttcatttttaaatgtacttgctcagctcaactgcatttcagttgtattatagtccagttcttatcaacattaaaacctatagcaatcatttcaaatctattctgcaaattgtataagaataaagttagaattaacaattttattttgtacaacagtggaattttctgtcatggataatgtgcttgagtccctataatctatagacatgtgatagcaaaagaaacaaacaaaagccaggaaaacactcattttcgccttgaatatgtaaatgggattaattttgtcctgtgccttatgtggaaagggacttctttgggttttccttttttgttctggtggaagcatgtgcagggagaccatatcatccaaaccataaacccattaaaatgtttgtggtttgcttggctgtaattttcaaagtagttaattgaggacaaagggtaatgcagaagtgatagctttggtttgctgagtcttgttttaagtggccttgatatttaaaactattcctgccaccatttcttctccttggccacttcttccttgcgtctccctgcatgctgctttatttgcttctccctccccaaccacctcatggtatatttaagagtgaaagggacaaactagtaggtttgtcaagtttaatataaagcactgatgtaacttgctaggtaaacggaaagataagttctaactgcctactatccaatgtcagttaattggtgtcttcccccctcatttgctctcttccctaaaatgtgtcccagatgccttcatttgctgttttacttctatgttctgcttttcctcctctctttgttcccttcctgtctatccattgagtttatgaaatggaagagttaactgcatgcactagtgtttggagggtgttgtggtttgtctttctaattaggtgtatagcctattcactttcctaggaataaatctcttaacctaaatttgagtagtctgcattttggcaactcctctaagcagcttggtagcctaagtacaggttgtttttttaaaaaaggaaaagcaggaaggaggagtgaattttattaacatgtttgccaaatgtattgagatttggcctctgaagaacactttttcagtgttaagtttctttaccttaagattccgaaatactttagaatattattaattttaagtcctgtctttacatccttttggaaaacttgtattaccatgagtttggaaaaaggacaacgaaaggcttttcatgtaaagataagatctttagctatctctaaccctgtccttttttcactgcattttttctagttttgcttcattgcttatcattaggatagggtaagtgaagtttgctatgctgctagcatcctaagatgatacctttgttgaaagaattgtgaatagcatgattcatttctagcagaggctgagtttaggacagcagcttccattgagaagtctttctgtgtcgtgaatagcattttaatgacctcttggctcacataagcaaacaacatagggacgtatctgctatgaaaatccacaaatttttcagatagtgccctaaaaacaattttatatgcctcactggttgttattcttaggttattcccacacttgactttatcattgtttactactagtaaaaagcagcattgccaaataatccctaattttccactaaaaatataatgaaatgatgttaagctttttgaaaagtttaggttaaacctactgttgttagattaatgtatttgttgcttccctttatctggaatgtggcattagcttttttattttaaccctctttaattcttattcaattccatgacttaaggttggagagctaaacactgggatttttggataacagactgacagttttgcataattataatcggcattgtacatagaaaggatatggctaccttttgttaaatctgcactttctaaatatcaaaaaagggaaatgaagtataaatcaatttttgtataatctgtttgaaacatgagttttatttgcttaatattagctttgccccttttctgtaagtctcttgggatcctgtgtagaagctgttctcattaaacaccaaacagttaagtccattctctggtactagctacaaattcggtttcatattctacttaacaatttaaataaactgaaatatttctagatggtctacttctgttcatataaaaacaaaacttgatttccaaaaaaaaaaaaaaaaaaaaaaaaaaaaaaaaa

SEQ ID NO: 1476 - protein, 200 aa, Homo sapien
MAKKTYDLLFKLLLIGDSGVGKTCVLFRFSDDAFNTTFISTIGIDFKIKTVELQGKKIKLQIWDTAGQERFHTITTSYYRGAMGIMLVYDITNGKSFENISKWLRNIDEHANEDVERMLLGNKCDMDDKRVVPKGKGEQIAREHGIRFFETSAKANINIEKAFLTLAEDILRKTPVKEPNSENVDISSGGGVTGWKSKCC

SEQ ID NO: 1477 - DNA, 1217 bp, Homo sapien
caactcatggcggcggcggcggcggcggcagctgcttgggcgcggtgcggtggtgactgagctacgagcctggcggcgggtgtgcgccgagccccggcccggcccggccctcgcgtgcctcccaggctccgcacccctgatgctgcgcgggtgctgagcccgcttcggccgggacgatggtgaagtatttcctgggccagagcgtgctccggagttcctgggaccaagtgttcgccgccttctggcagcggtacccgaatccctatagcaaacatgtcttgacggaagacatagtacaccgggaggtgacccctgaccagaaactgctgtcccggcgactcctgaccaagaccaacaggatgccacgctgggccgagcgactatttcctgccaatgttgctcactcggtgtacgtcctggaggactctattgtggacccacagaatcagaccatgactaccttcacctggaacatcaaccacgcccggctgatggtggtggaggaacgatgtgtttactgtgtgaactctgacaacagtggctggactgaaatccgccgggaagcctgggtctcctctagcttatttggtgtctccagagctgtccaggaatttggtcttgcccggttcaaaagcaacgtgaccaagactatgaagggttttgaatatatcttggctaagctgcaaggcgaggccccttccaaaacacttgttgagacagccaaggaagccaaggagaaggcaaaggagacggcactggcagctacagagaaggccaaggacctcgccagcaaggcggccaccaagaagcagcagcagcagcaacagtttgtgtagccagtctaccaccaccacagcaccccagacagctaggcttagcccctctgccctcccttcattgtactttatcattaaaaatcaacttccagccctgtctgctgtctacgtggtgggttgtggggatgcagtttggcatctgcagtacaccaagcacatgattcatgtctgagccaggtctgcttattctcccattgggcagctgaggaccgaggcacagaggtgcggtgacttgcccggggctccaggtagcctgcaggttaactggcggtaagtgctagactgtaagcccgacaagggcagggcttttggttttgttctctgatgtgtctcagtatctagcacataatagacactcaataaatacttgttgaattcaaa

SEQ ID NO: 1478 - protein, 219 aa, Homo sapien
MVKYFLGQSVLRSSWDQVFAAFWQRYPNPYSKHVLTEDIVHREVTPDQKLLSRRLLTKTNRMPRWAERLFPANVAHSVYVLEDSIVDPQNQTMTTFTWNINHARLMVVEERCVYCVNSDNSGWTEIRREAWVSSSLFGVSRAVQEFGLARFKSNVTKTMKGFEYILAKLQGEAPSKTLVETAKEAKEKAKETALAATEKAKDLASKAATKKQQQQQQFV

SEQ ID NO: 1479 - DNA, 2855 bp, Homo sapien
ctcgtgacaatcttcgggtgcccttcgagagaaaaggggaggatgccactggagtcatcctcttcaatgccactatccttcccatctctcttaccctcagtaccacacaatactaacccttcccctcctctgatgtcttacatcacctcccaggagatgaagtgtattcttcactggtttgccaattggtcaggtccccagcgtgaacgtttcctagaggacctggtagctaaggcagtgccagaaaaattacaaccactgctggatagtctggagcagcttagtgtgtctggggcagaccgaccaccttctatctttgagtgccagctacatctttgggatcagtggtttcgaggctgggctgagcaggagcgcaatgaatttgtcagacagctggagttcagtgagccagacttcgtggcaaagttttaccaagcagtggctgctacagctggtaaggactgataggcattcagaccaaagaagataaccatagctgatggagccatgactctctacaatgataactcaattcaaatgtgttgcctaaagctctggaactggtattccaaccagctgaccgaactcactgaccagtacaggcatggttatttcaacattaatagcatgtcaactggactcctatttgtaaatgttatcaatctaagcaatccagctcatcagtctactagtttgcttctttccgagagatgtcaagtcctcaagaatttgatggcttcttctgcagctataaccacaaggaacctacacattgtaactcaagtccactgctggctcatgaaatgtgtaaagtagaaccctccttcccgagaaataagacaggacaataaaaggtggcgtttttgtactttacctggattccattggctggttttaccactcctatcagattgtagtgtaattgtgtgatacgcaaaccattagttttcccagtgatgatttaataaaattatgaaaaatcaggagagggagataattagttgcttcctccttcacactgtttgaatcgaactcgcggtgacttttttttttttttaaaaacatgggttgtcacttaagtttggagtgcagtggcatgatcatcagtgagcgtgagatcactgtgacctcaaattctaggctgaagtaatctttctgcctcagtctcctgagtatctaggactacaggcccgcacaacaatatctggctaatttttaaattattctgtagatacaggggtcatgctacgttttctagtctggtcttgaactgctggcctcaagcgatccattctcaccttggcctcccaaagtgctgggattacaggcatgaaccatcatacctggcctttttctaaggcatatgtatgtgatattcttggaactggtagcaggtgttcctattctgtaagtttgctttacaacaatacgaaaataagtgacaatttacaggttgaacaatttatttttgtaccaaaataaagaatggatctttagaactgtaaaacttcacccttttttcattgccaggctatataatattgacaaccggggaaagaggcattccaaagaaagtagaaattaagtatacacaatagattttccatccagttgtctcacaagaaattattctcttccttaccccctgtcatgttctgggcaacatcatacctcccttattcctctaactgggacccttgtgctgtggagctctggtgaatggtaagaggcagatggtctcacaggaagagtggctcttttctggtaggctgtggttcccattacacccaccaggattagcagcattaggcagagtcccatggacagccttaggtgggtcatggagggattatggtctgaagtaaccagcaacctaggaacatagaaggtaatatttggcatggaataatgcctagccttagtagataaagcggcattacctttttttttttttttttttggagacaaggtcttggtctgttgcccaggctggagtgcagtggtgtgatcttggctcaccgtaatctccgcctcccaggctcaagcaattctcctgcctcaaccttccgaatagctgggactacaggcgcacgccgcaccaccacgtctggctaaggggctttacccttaaagatagagctcatgaagccccgcctcatccaagcattaagctaaacaggaaatcattaagagggactatcgaaccttaaagtagaaataagatcaagatctaagtcttctagcatcttatattattggaagaagacctaacttggcagcaagggaagtggcttaagggaagagtcagtctatgttctttaggtagctagacacaatccctaacagtgcttaagaaaggaagggggctgggagtggtggcagtggctcccagcactttgggaggcagaggccggtgggttgctttagctcaggagttggagacaagcctgggcaacatggtgaaactgtctctatcaaaaatacaaaaattagctggcatggtggtgtgcacctgtagtcccagctacttgggaggctgaggtgggggaatcacttgagcctagggaggtcgaggccacagtgagctgagatcaccccactgcattccagcctgggtgacagagcgagaccctgtctcaaaaaagaagaagaaaaaggtggggggaggggactaagatccctatgtcctagagatgggggaatgtgttattgtatgggaggagggagtcaggtagtgacgggactggatgatcgtgttagggatctttgttctctgaaacgcaaccctgtctaggacaatatacacgtgagtgagtgcttaataaatttaatttcaaacaaaaaaaaaaaaaaaa

SEQ ID NO: 1480 - protein, 140 aa, Homo sapien
MPLESSSSMPLSFPSLLPSVPHNTNPSPPLMSYITSQEMKCILHWFANWSGPQRERFLEDLVAKAVPEKLQPLLDSLEQLSVSGADRPPSIFECQLHLWDQWFRGWAEQERNEFVRQLEFSEPDFVAKFYQAVAATAGKD

SEQ ID NO: 1481 - DNA, 676 bp, Homo sapien
cggatggggcgtaggtgggcggtgcgcccacagctgcctgggtaaggcccaagatggctgtcttcgccttagtactcgtgtgaagttggcggggacggttcctgtcatcttcttgggcttatttggtgtgctgttgaaggggggagactagagaaatggcagggaacctcttatccggggcaggtaggcgcctgtgggactgggtgcctctggcgtgcagaagcttctctcttggtgtgcctagattgatcggtataaggctcactctcccgccccccaaagtggttgatcgttggaacgagaaaagggccatgttcggagtgtatgacaacatcgggatcctgggaaactttgaaaagcaccccaaagaactgatcagggggcccatatggcttcgaggttggaaagggaatgaattgcaacgttgtatccgaaagaggaaaatggttggaagtagaatgttcgctgatgacctgcacaaccttaataaacgcatccgctatctctacaaacactttaaccgacatgggaagtttcgatagaagagaaagctgagaacttcggaaaaggctcatctgtcaccctggagaagggaaactgtacttttccctgtgaggaaacggctttgtattttctctgtaataaaatggggcttctttggaaaaaaaaaaaaaaa

SEQ ID NO: 1482 - protein, 128 aa, Homo sapien
MAGNLLSGAGRRLWDWVPLACRSFSLGVPRLIGIRLTLPPPKVVDRWNEKRAMFGVYDNIGILGNFEKHPKELIRGPIWLRGWKGNELQRCIRKRKMVGSRMFADDLHNLNKRIRYLYKHFNRHGKFR

SEQ ID NO: 1483 - DNA, 1988 bp, Homo sapien
ggctcattctgctcccccgggtcggagccccccggagctgcgcgcgggcttgcagcgcctcgcccgcgctgtcctcccggtgtcccgcttctccgcgccccagccgccggctgccagcttttcggggccccgagtcgcacccagcgaagagagcgggcccgggacaagctcgaactccggccgcctcgcccttccccggctccgctccctctgccccctcggggtcgcgcgcccacgatgctgcagggccctggctcgctgctgctgctcttcctcgcctcgcactgctgcctgggctcggcgcgcgggctcttcctctttggccagcccgacttctcctacaagcgcagcaattgcaagcccatcccggccaacctgcagctgtgccacggcatcgaataccagaacatgcggctgcccaacctgctgggccacgagaccatgaaggaggtgctggagcaggccggcgcttggatcccgctggtcatgaagcagtgccacccggacaccaagaagttcctgtgctcgctcttcgcccccgtctgcctcgatgacctagacgagaccatccagccatgccactcgctctgcgtgcaggtgaaggaccgctgcgccccggtcatgtccgccttcggcttcccctggcccgacatgcttgagtgcgaccgtttcccccaggacaacgacctttgcatccccctcgctagcagcgaccacctcctgccagccaccgaggaagctccaaaggtatgtgaagcctgcaaaaataaaaatgatgatgacaacgacataatggaaacgctttgtaaaaatgattttgcactgaaaataaaagtgaaggagataacctacatcaaccgagataccaaaatcatcctggagaccaagagcaagaccatttacaagctgaacggtgtgtccgaaagggacctgaagaaatcggtgctgtggctcaaagacagcttgcagtgcacctgtgaggagatgaacgacatcaacgcgccctatctggtcatgggacagaaacagggtggggagctggtgatcacctcggtgaagcggtggcagaaggggcagagagagttcaagcgcatctcccgcagcatccgcaagctgcagtgctagtcccggcatcctgatggctccgacaggcctgctccagagcacggctgaccatttctgctccgggatctcagctcccgttccccaagcacactcctagctgctccagtctcagcctgggcagcttccccctgccttttgcacgtttgcatccccagcatttcctgagttataaggccacaggagtggatagctgttttcacctaaaggaaaagcccacccgaatcttgtagaaatattcaaactaataaaatcatgaatatttttatgaagtttaaaaatagctcactttaaagctagttttgaataggtgcaactgtgacttgggtctggttggttgttgtttgttgttttgagtcagctgattttcacttcccactgaggttgtcataacatgcaaattgcttcaattttctctgtggcccaaacttgtgggtcacaaaccctgttgagataaagctggctgttatctcaacatcttcatcagctccagactgagactcagtgtctaagtcttacaacaattcatcattttataccttcaatgggaacttaaactgttacatgtatcacattccagctacaatacttccatttattagaagcacattaaccatttctatagcatgatttcttcaagtaaaaggcaaaagatataaattttataattgacttgagtactttaagccttgtttaaaacatttcttacttaacttttgcaaattaaacccattgtagcttacctgtaatatacatagtagtttacctttaaaagttgtaaaaatattgctttaaccaacactgtaaatatttcagataaacattatattcttgtatataaactttacatcctgttttacctataa

SEQ ID NO: 1484 - protein, 295 aa, Homo sapien
MLQGPGSLLLLFLASHCCLGSARGLFLFGQPDFSYKRSNCKPIPANLQLCHGIEYQNMRLPNLLGHETMKEVLEQAGAWIPLVMKQCHPDTKKFLCSLFAPVCLDDLDETIQPCHSLCVQVKDRCAPVMSAFGFPWPDMLECDRFPQDNDLCIPLASSDHLLPATEEAPKVCEACKNKNDDDNDIMETLCKNDFALKIKVKEITYINRDTKIILETKSKTIYKLNGVSERDLKKSVLWLKDSLQCTCEEMNDINAPYLVMGQKQGGELVITSVKRWQKGQREFKRISRSIRKLQC

SEQ ID NO: 1485 - DNA, 1506 bp, Homo sapien
ggcacgagggttggacgtgttcgcttgggttcctgctgcggcagccacctcgcaatctctctgcatcgatcgccgctcgcaagctactgaccgtactcgggcgtattaggagccgcgttccagcctcacaccccacggtgctgttttcgacttcagaaaggatctagcctcagcacagaagcgcctcaggcgcggcgcaaagctcgagcggacggcgggggcggccggagcctctctcgggggagccgcgcctgaggaggcggaagaacccccctgacgcgactggcgtgtgcttctgcccgccaccgcccctcccgctctcacccgggccgtccctggccactgcccctgccgcggaggcagcggcggcagcggctctcctttccacagccggcgctccgcgacccgcttggctcctgagcccgtcgggtaggctctcctcgagttcccgctcttcaccccttccctcaccctcttctttcgtcacccgtccccgaccccacccgagcccggcgcctcagctgcccccggccatggcgtgcggagccactctgaaaaggactctggatttcgacccgctgttgagcccggcgtccccgaagcgcaggcgatgtgcgccattgtcggcgcccacctcggccgctgcctccccgttgtcggcggccgcggccaccgccgcctccttctccgctgcggccgcctcgccgcagaagtatctccgaatggagccatcccccttcggcgacgtctcctcccgcctcaccacagaacaaattctgtacaacataaaacaagagtataaacgaatgcagaagagaagacatttagaaacgagtttccaacagacagatccgtgttgtacttctgatgcacagccacatgcatttctcctcagtggaccagcttcaccagggacttcatctgcagcatcctcaccattaaaaaaagaacagcccttatttactctacggcaggttgggatgatctgtgaacgtttgttgaaagaacgtgaagagaaagttcgagaagaatatgaagaaatattgaacacaaaacttgcagaacaatatgatgcgtttgtgaagtttacgcatgatcaaataatgcgacgatatggagaacagcctgctagctatgtttcatgaatcacgtatcctgcatttgtgggctgccttgttccttgttgagttgttgcaagaggtcccaattatgacatgcagcaatgccaataccccttctgtgaatacaggttatttcaagctttcgtcagtggcaaccactcttaggcagcagcaactggttttggaaatttccctgatgtcagtaccacctggatgtggacctttgctacctgtattaataccagtggcctcattttgctgtatcattacaatttggcttcttatattaatgtttgaaaaggattaaagctggtattctagaacatgcccttcactggttgtgtaaataaaactgtagaatgacaaaaaaaaaaaaaaaaaaaaa

SEQ ID NO: 1486 - protein, 203 aa, Homo sapien
MACGATLKRTLDFDPLLSPASPKRRRCAPLSAPTSAAASPLSAAAATAASFSAAAASPQKYLRMEPSPFGDVSSRLTTEQILYNIKQEYKRMQKRRHLETSFQQTDPCCTSDAQPHAFLLSGPASPGTSSAASSPLKKEQPLFTLRQVGMICERLLKEREEKVREEYEEILNTKLAEQYDAFVKFTHDQIMRRYGEQPASYVS

SEQ ID NO: 1487 - DNA, 1581 bp, Homo sapien
ggcacgagggagagagagagagggcattgctggcctgtagctcctgttacccacccagagccaggcgccacactggaggctcccaggcgggagggcccaggcccacccacgggcgtctggccggtcaagctcccagcctgggccgtggtctcctggggacgccgctggcctcccagcttaggcccaggtgccaggtgtcatggggtctcctgcccatcttcccaaggatgccattgctgtcttcatcgtcttcccccgtgtgagacactggttgtctggtactcggcgacagtgtaccagacgcgcaccctatgtgaggtgctttaaggtccctgtcctcaggaagcgcagtctggtggaagagatgagcgctgaacaaatcactaaataacacaaaacaacaatgtaagcagcactttcttgtgtaaaaaaaaaaaaaaagcacgtcctgtcgatgaattttgagtctctctgccttgcctgtcccgactccctttcgcgcaccgtggcatgagaatctttcctcacgctgttcgttgcggtattgctgagcattgatgttgatttgaaggaaaagccgtggttggacccagctgtgtgtttcactcacgtgcaattgagtagctgttgccaggctgtccatgcctgttgtgactaccggttggggtcagatttggggtgaagaatgagtaagtttctgcatgctttgtctctacctgagacacttctacaacaagccaagtataatctctccagccctgcagattttcacctgacttgttcagccccatgcgtagactcccgctgcaggcctctggcctgtggctcactgcatgcagcccctggcgtgcaatactagtgctccacggcgcgatgtgcttctagcccttgcactgcacctaggctcagggttcaaacggccagcccgaaaagcctgcctgccttctttctggaaacagcacgtccccggccgtgtgcctgcccctttctctactgagctagtccccaaaccaaaggcaagccccctcgggcctcgggggatggggccggccacacccctgactccgccctggctctgccccatacccctgccgtggggccgacctgggggatgcagacatccggctccgtattcctgcctatcggggccaggatgcaaaaacaatttttgcgtaaaagatgtcacactgatctgctggagtggggtggacacatgaattcagttttatcatgaacactcgccactggctgcttgttaattcagggataatggtggcattcttacaaactgctcgggaaatagaatgacgggaacacttttagggagcccaggaagttaccagggacattggtgtcgccggcccaggcaacagcagcgtacgcttttcaaagatcattgagttgtcttagaatttgaagctgtgtaatgacaatgtcacctggagttcgtctccatttcttaactttttgttgcacaagtatttggacagaagtcgaactgtgaatgagatactgaaatgcactaaattgtattacattaaactggagttacttgatacaatgaaaaaaaaaaaaaaaaaa

SEQ ID NO: 1488 - protein, 63 aa, Homo sapien
MGSPAHLPKDAIAVFIVFPRVRHWLSGTRRQCTRRAPYVRCFKVPVLRKRSLVEEMSAEQITK

SEQ ID NO: 1489 - DNA, 1215 bp, Homo sapien
gtgacattgagctcaccagcgccaccgtccccggcgaagttctgcgctggtcggcggagagcaagtggccatggggagcctcagcggtctgcgcctggcagcaggaagctgttttaggttatgtgaaagagatgtttcctcatctctaaggcttaccagaagctctgatttgaagagaataaatggattttgcacaaaaccacaggaaagtcccggagctccattcccgcacttacaacagagtgcctttacacaaacctacggattggcagaaaaagatcctcatatggtcaggtcgcttcaaaaggaagatgaaatcccagagactgtctcgttggagatgcttgatgctgcaaagaacaagatgcgagtgaagatcagctatctaatgattgccctgacggtggtaggatgcatctttcattggttattgagggcaagaagcttgcccaaagaccgagactttaaccagcttggacctttagaaaagaaagctcgtctgaaagaaggaagcagctatgaaggccaaaacagattaccaaaggtatccgtgttggttgggattttgaaaatccaggaattatgttttaacgtgcctgtattaaaaaggatgtggtatgaggatccatttcataaagtatgatttgcccaaacctgtaccatttccgtatttctgctgtagaagtagaaataaattttcttaaataatgactgtgttttattgttttgatccaagtcaagtgtagcctctcagccttttggagaaaaatgaaacaatttatttcaacttgaataccaactcttcagagaagcaggtaccatatcttacttctcttcccattatcaaagtaacctctccacaggcgaactcattttgaggagataaggaaggccagttgagtatatggcccaggtgcagcttggagggccagccttctcaaatgtcctggtgtactggtggggaggctgccccctaatagagcgagcgctgagaagcagccagaccacattctataatctttgaacatgctggcagatggaggcttttaggagaatagttttttaaacattctgacaaggtccagccaggaatttctaaggacttagaaatcccagtgtcatggagttgcttgggggtcaacacaagtcacctcttagcttcatgccttagaattctcaactgggctgtttttcttaccacctgagaaactaaat

SEQ ID NO: 1490 - protein, 190 aa, Homo sapien
MGSLSGLRLAAGSCFRLCERDVSSSLRLTRSSDLKRINGFCTKPQESPGAPFPHLQQSAFTQTYGLAEKDPHMVRSLQKEDEIPETVSLEMLDAAKNKMRVKISYLMIALTVVGCIFHWLLRARSLPKDRDFNQLGPLEKKARLKEGSSYEGQNRLPKVSVLVGILKIQELCFNVPVLKRMWYEDPFHKV

SEQ ID NO: 1491 - DNA, 3869 bp, Homo sapien
gagccggtggcgcaggtgtcggggtcctcgagcgcccagcctgggagcatgattgtggacaagctgctggacgacagccgcggcggagaggggctgcgggacgcggcgggcggctgcggcctcatgaccagcccgctcaacctgagctacttctacggcgcgtcgccgcccgccgccgccccgggcgcctgcgacgccagctgctcggtcttgggcccctcggcgcccggctcgcccggctccgactcctccgacttctcctctgcctcgtcggtgtcctcctgcggcgccgtggagtcccggtcgagaggcggcgcccgcgccgagcgccagccagttgagccccatatgggggttggcaggcagcagagaggcccctttcaaggtgttcgggtaaagaactcagtgaaggaactcctgttgcacatccgaagtcataaacagaaggcttctggccaagctgtggatgattttaagacacaaggtgtgaacatagaacagttcagagaattgaagaacacagtatcatacagtgggaaaaggaaagggcccgattcgttgtctgatggacctgcttgcaaaaggccagctctgttgcattcccaatttttgacaccacctcaaacaccaacgcccggggagagcatggaagatgttcatctcaatgaacccaaacaggagagcagtgctgatctgcttcagaacattatcaacattaagaatgaatgcagccccgtttccctgaacacagttcaagttagctggctgaaccccgtggtggtccctcagagctcccccgcagagcagtgtcaggacttccatggagggcaggtcttttctccacctcagaaatgccaaccattccaagtcaggggctcccaacaaatgatagaccaggcttccctgtaccagtattctccacagaaccagcatgtagagcagcagccacactacacccacaaaccaactctggaatacagtccttttcccatacctccccagtcccccgcttatgaaccaaacctctttgatggtccagaatcacagttttgcccaaaccaaagcttagtttcccttcttggtgatcaaagggaatctgagaatattgctaatcccatgcagacttcctccagtgttcagcagcaaaatgatgctcacttgcacagcttcagcatgatgcccagcagcgcctgtgaggccatggtggggcacgagatggcctctgactcttcaaacacttcactgccattctcaaacatgggaaatccaatgaacaccacacagttagggaaatcactttttcagtggcaggtggagcaggaagaaagcaaattggcaaatatttcccaagaccagtttctttcaaaggatgcagatggtgacacgttccttcatattgctgttgcccaagggagaagggcactttcctatgttcttgcaagaaagatgaatgcacttcacatgctggatattaaagagcacaatggacagagtgcctttcaggtggcagtggctgccaatcagcatctcattgtgcaggatctggtgaacatcggggcacaggtgaacaccacagactgctggggaagaacacctctgcatgtgtgtgctgagaagggccactcccaggtgcttcaggcgattcagaagggagcagtgggaagtaatcagtttgtggatcttgaggcaactaactatgatggcctgactccccttcactgtgcagtcatagcccacaatgctgtggtccatgaactccagagaaatcaacagcctcattcacctgaagttcaggagcttttactgaagaataagagtctggttgataccattaagtgcctaattcaaatgggagcagcggtggaagcgaaggatcgcaaaagtggccgcacagccctgcatttggcagctgaagaagcaaatctggaactcattcgcctctttttggagctgcccagttgcctgtcttttgtgaatgcaaaggcttacaatggcaacactgccctccatgttgctgccagcttgcagtatcggttgacacaattagatgctgtccgcctgttgatgaggaagggagcagacccaagtactcggaacttggagaacgaacagccagtgcatttggttcccgatggccctgtgggagaacagatccgacgtatcctgaagggaaagtccattcagcagagagctccaccgtattagctccattagcttggagcctggctagcaacactcactgtcagttaggcagtcctgatgtatctgtacatagaccatttgccttatattggcaaatgtaagttgtttctatgaaacaaacatatttagttcactattatatagtgggttatattaaaagaaaagaagaaaaatatctaatttctcttggcagatttgcatatttcatacccaggtatctgggatctagacatctgaatttgatctcaatggtaacattgccttcaattaacagtagcttttgagtaggaaaggactttgatttgtggcacaaaacattattaatatagctattgacagtttcaaagcaggtaaattgtaaatgtttctttaagaaaaagcatgtgaaaggaaaaaggtaaatacagcattgaggcttcatttggccttagtccctgggagttactggcgttggacaggcttcagtcattggactagatgaaaggtgtccatggttagaatttgatctttgcaaactgtatataattgttatttttgtccttaaaaatattgtacatacttggttgttaacatggtcatatttgaaatgtataagtccataaaatagaaaagaacaagtgaattgttgctatttaaaaaaattttacaattcttactaaggagtttttattgtgtaatcactaagtctttgtagataaagcagatggggagttacggagttgttcctttactggctgaaagatatattcgaattgtaaagatgctttttctcatgcattgaaattatacattatttgtagggaattgcatgcttttttttttttttctcccgagacagggtcttgctctggcgcccaggctggagtacagtggcatgatcttggctcacttcagccttgacttgggctcaagtgatcctcctacctgagccttctgagtaactgggactacaggtgtgcactcctcgcctggctaattttttattttttgtacaggcaggatcttgccaccttgcccaggctggtcttgaactcctgagctcatgccatctgcctgccttagtctcccaaaatgctgggattacaggagtgagccaccatgcccggctggcagttgcatggaagagaacacctctttatggcttaccctctagaatttctaatttatgtgttctgttgaaatttttgtttttttacctttattgaaacaacaaaaagtcagtattgaaacatatcttcctgttttctgttgtcaaatgatgataatgtgccatgatgttttatatatatcattcagaaaaagttttattttttaataacattctattaacattattttgcttgccgctggcatgcctgaggaatgtatttggctttgattacacactaagtttttgtaataaatttgactcattaaaaaccttttttttttaaaaaaaaaaaaaagaaaatctcattagtgaacttatctttgcagctgagtacttaaattctttttaaaaagataccctttggattgatcacattgtttgacccagtatgtcttgtagacacgttagttataatcaccttgtatctctaaatatggtgtgatatgaaccagtccattcacattggaaaaactgatggttttaaataaactaattcactaataaaaaaaaaaaaaaa

SEQ ID NO: 1492 - protein, 718 aa, Homo sapien
MIVDKLLDDSRGGEGLRDAAGGCGLMTSPLNLSYFYGASPPAAAPGACDASCSVLGPSAPGSPGSDSSDFSSASSVSSCGAVESRSRGGARAERQPVEPHMGVGRQQRGPFQGVRVKNSVKELLLHIRSHKQKASGQAVDDFKTQGVNIEQFRELKNTVSYSGKRKGPDSLSDGPACKRPALLHSQFLTPPQTPTPGESMEDVHLNEPKQESSADLLQNIINIKNECSPVSLNTVQVSWLNPVVVPQSSPAEQCQDFHGGQVFSPPQKCQPFQVRGSQQMIDQASLYQYSPQNQHVEQQPHYTHKPTLEYSPFPIPPQSPAYEPNLFDGPESQFCPNQSLVSLLGDQRESENIANPMQTSSSVQQQNDAHLHSFSMMPSSACEAMVGHEMASDSSNTSLPFSNMGNPMNTTQLGKSLFQWQVEQEESKLANISQDQFLSKDADGDTFLHIAVAQGRRALSYVLARKMNALHMLDIKEHNGQSAFQVAVAANQHLIVQDLVNIGAQVNTTDCWGRTPLHVCAEKGHSQVLQAIQKGAVGSNQFVDLEATNYDGLTPLHCAVIAHNAVVHELQRNQQPHSPEVQELLLKNKSLVDTIKCLIQMGAAVEAKDRKSGRTALHLAAEEANLELIRLFLELPSCLSFVNAKAYNGNTALHVAASLQYRLTQLDAVRLLMRKGADPSTRNLENEQPVHLVPDGPVGEQIRRILKGKSIQQRAPPY

SEQ ID NO: 1493 - DNA, 3243 bp, Homo sapien
gggcttcgtgttcctgggtgctgaccgtgcactccccgccgcccgaggacttagagctctggaagtagctctccagcttccttcgtactcgggggccggacttgtacacccgcacgaggagcggggacggcgggcgcagaagtgggccaccatatctggaaactacagtctatgctttgaagcgcaaaagggaataaacatttaaagactcccccggggacctggaggatggacttttccatggtggccggagcagcagcttacaatgaaaaatcaggtaggattacctcgctctcactcttgtttcagaaagtctttgctcagatctttcctcagtggagaaaggggaatacagaagaatgtctcccctacaagtgctcagagactggtgctcttggagaaaactatagttggcaaattcccattaaccacaatgacttcaaaattttaaaaaataatgagcgtcagctgtgtgaagtcctccagaataagtttggctgtatctctaccctggtctctccagttcaggaaggcaacagcaaatctctgcaagtgttcagaaaaatgctgactcctaggatagagttatcagtctggaaagatgacctcaccacacatgctgttgatgctgtggtgaatgcagccaatgaagatcttctgcatgggggaggcctggccctggccctggtaaaagctggtggatttgaaatccaagaagagagcaaacagtttgttgccagatatggtaaagtgtcagctggtgagatagctgtcacgggagcagggaggcttccctgcaaacagatcatccatgctgttgggcctcggtggatggaatgggataaacagggatgtactggaaagctgcagagggccattgtaagtattctgaattatgtcatctataaaaatactcacattaagacagtagcaattccagccttgagctctgggatttttcagttccctctgaatttgtgtacaaagactattgtagagactatccgggttagtttgcaagggaagccaatgatgagtaatttgaaagaaattcacctggtgagcaatgaggaccctactgttgctgcctttaaagctgcttcagaattcatcctagggaagagtgagctgggacaagaaaccaccccttctttcaatgcaatggtcgtgaacaacctgaccctccagattgtccagggccacattgaatggcagacggcagatgtaattgttaattctgtaaacccacatgatattacagttggacctgtggcaaagtcaattctacaacaagcaggagttgaaatgaaatcggaatttcttgccacaaaggctaaacagtttcaacggtcccagttggtactggtcacaaaaggatttaacttgttctgtaaatatatataccatgtactgtggcattcagaatttcctaaacctcagatattaaaacatgcaatgaaggagtgtttggaaaaatgcattgagcaaaatataacttccatttcctttcctgcccttgggactggaaacatggaaataaagaaggaaacagcagcagagattttgtttgatgaagttttaacatttgccaaagaccatgtaaaacaccagttaactgtaaaatttgtgatctttccaacagatttggagatatataaggctttcagttctgaaatggcaaagaggtccaagatgctgagtttgaacaattacagtgtcccccagtcaaccagagaggagaaaagagaaaatgggcttgaagctagatctcctgccatcaatctgatgggattcaacgtggaagagatgtgtgaggcccacgcatggatccaaagaatcctgagtctccagaaccaccacatcattgagaataatcatattctgtaccttgggagaaaggaacatgacattttgtctcagcttcagaaaacttcaagtgtctccatcacagaaattatcagcccaggaaggacagagttagagattgaaggagcccgggctgacctcattgaggtggttatgaacattgaagatatgctttgtaaagtacaggaggaaatggcaaggaaaaaggagcgaggcctttggcgctcgttaggacagtggactattcagcaacaaaaaacccaagacgaaatgaaagaaaatatcatatttctgaaatgtcctgtgcctccaactcaagagcttctagatcaaaagaaacagtttgaaaaatgtggtttgcaggttctaaaggtggagaagatagacaatgaggtccttatggctgcctttcaaagaaagaagaaaatgatggaagaaaaactgcacaggcaacctgtgagccataggctgtttcagcaagtcccataccagttctgcaatgtggtatgcagagttggctttcaaagaatgtactcgacaccttgcgatccaaaatacggagctggcatatacttcaccaagaacctcaaaaacctggcagagaaggccaagaaaatctctgctgcagataagctgatctatgtgtttgaggctgaagtactcacaggcttcttctgccagggacatccgttaaatattgttcccccaccactgagtcctggagctatagatggtcatgacagtgtggttgacaatgtctccagccctgaaacctttgttatttttagtggcatgcaggctatacctcagtatttgtggacatgcacccaggaatatgtacagtcacaagattactcatcaggaccaatgagaccctttgcacagcatccttggaggggattcgcaagtggcagccctgttgattaatctctacatcattttaacagctggtatggccttaccttgggtgaactaaccaaataatgaccatcgatggctcaaagagtggcttgaatatatcccatgggttatctgtatggactgactgggttattgaaaggactagccacatactagcatcttagtgcctttatctgtctttatgtcttggggttggggtaggtagataccaaatgaaacactttcaggaccttccttcctcttgcagttgttctttaatctcctttactagaggagataaatattttgcatataatgaagaaatttttctagtatataacgcaggccttttattttctaaaatgatgatagtataaaaatgttaggataacagaatgattttagattttccagagaatattataaagtgctttaggtatgaaaataaatcatctttgtctgattaaaaaaaaaaaa

SEQ ID NO: 1494 - protein, 854 aa, Homo sapien
MDFSMVAGAAAYNEKSGRITSLSLLFQKVFAQIFPQWRKGNTEECLPYKCSETGALGENYSWQIPINHNDFKILKNNERQLCEVLQNKFGCISTLVSPVQEGNSKSLQVFRKMLTPRIELSVWKDDLTTHAVDAVVNAANEDLLHGGGLALALVKAGGFEIQEESKQFVARYGKVSAGEIAVTGAGRLPCKQIIHAVGPRWMEWDKQGCTGKLQRAIVSILNYVIYKNTHIKTVAIPALSSGIFQFPLNLCTKTIVETIRVSLQGKPMMSNLKEIHLVSNEDPTVAAFKAASEFILGKSELGQETTPSFNAMVVNNLTLQIVQGHIEWQTADVIVNSVNPHDITVGPVAKSILQQAGVEMKSEFLATKAKQFQRSQLVLVTKGFNLFCKYIYHVLWHSEFPKPQILKHAMKECLEKCIEQNITSISFPALGTGNMEIKKETAAEILFDEVLTFAKDHVKHQLTVKFVIFPTDLEIYKAFSSEMAKRSKMLSLNNYSVPQSTREEKRENGLEARSPAINLMGFNVEEMCEAHAWIQRILSLQNHHIIENNHILYLGRKEHDILSQLQKTSSVSITEIISPGRTELEIEGARADLIEVVMNIEDMLCKVQEEMARKKERGLWRSLGQWTIQQQKTQDEMKENIIFLKCPVPPTQELLDQKKQFEKCGLQVLKVEKIDNEVLMAAFQRKKKMMEEKLHRQPVSHRLFQQVPYQFCNVVCRVGFQRMYSTPCDPKYGAGIYFTKNLKNLAEKAKKISAADKLIYVFEAEVLTGFFCQGHPLNIVPPPLSPGAIDGHDSVVDNVSSPETFVIFSGMQAIPQYLWTCTQEYVQSQDYSSGPMRPFAQHPWRGFASGSPVD

SEQ ID NO: 1495 - DNA, 2403 bp, Homo sapien
ctgactaacgtgggcggagctctagctcgcgtatcctgaggaggcggggttggcctaggcgaagatccggactctgggtgttttgctaccgtgaccgtttagaacagaaactgttcatacttggtgcgctgtggactcttgtgataattaaccaagagtagctctatttgtccaacctcacacctaaagaagaaagaaaatggcttgtgctgagttttcttttcatgtaccaagtcttgaagagcttgctggagttatgcagaaggggttaaaagataactttgctgatgtccaggtctctgtagttgattgccctgatttgactaaggaaccctttacctttcctgtaaaaggcatctgtgggaaaactagaattgcagaagttggaggtgtgccttacttattgcctcttgtaaaccaaaaaaaagtttatgatctgaataaaattgcaaaagaaatcaagctgcctggagcctttattcttggagcaggagcaggtccatttcagactctcgggttcaattctgagtttatgccagttattcagacagaaagtgaacacaagcctcctgtaaatggaagttactttgcccatgtgaaccctgcagatggagggtgcctactggagaaatacagtgagaaatgtcatgattttcagtgtgcattactggctaatctttttgccagtgaaggccaacctggcaagcctgcagaattttcttcctgccccttgaactctgatgaagaagtgaataaatggttgcatttttatgaaatgaaagctcctttggtttgtctaccagtttttgtctccagagacccagggtttgatttgcgactggagcacactcatttttttagtcgtcatggagaaggtggacactaccattatgacactactccagatatagtggaatatcttggatacttcttacctgcagagtttctctatcgcattgatcaaccaaaagagacgcattcaattgggcgagattaaatcagctgatacttatttagaaaaagaaataattaaggttaattaattgattgacttattaattaatactgatataaaaccaatagaaatgatcccacaggccaggcacaatggctcatgcctataatcccagcactttgggaggctgaggcaggaagcacactggagcccaggagtttgagaccagcttgggcaacatagcaagaccctgtctatttttttaaaaaagtaaaaaatagaaattatctcactacttaaatcccatttttttcacttcatatgaaagaacatattgatagtatattctatattatttcatagatctgtctgaaagagattgggaacaaaaatatctaattgagatattctttaattttttacatagcagctttattttttttattctgtagtatcagcgaaatcagtcatgtttataccttgaatataaatatcaggaatcatgcaattatttctactatgtatttagtagtatcttatatttgtataacattattacattttgcaaattagtatcacaactgctaagtagatgtttctgagtattagaaaaatcagtgttattacctgcaggatattaaaaaacatttgaaaaagagaaaaagaaaaatcagtgtttagaaatgttgatagttattgaatctttgaattgaattttaaaaatccattctagtaatcagagtatactttttttatagaacaaggtggcaggtggggagccctttacccttctggtgaagttaaaccatagaagtttacaatttgcctttcacaaacattagcagtccgggcatggtggctgaagcctgtgatcccagcatgttgggaggccgagtgggaggattgcctgagcctaggagtttaaaccagcctgggcaccatggtgagaccccatctctattatttaaaatgtttcttaaataaaaaaaacacaaacattagcaactagttggctagccataattcctcccttgtttcgattgccagttagaagcaatttttatttcactggttatttgcaagagaaggggtaaaaaaacagcatcagagtgcaacactgaagtgagcttactttaatttgtaagtgaagctgttgctgaacgtgaccactatcgttgctgaaatataaaattatactcactgattgtaatggttgaaattttcctgaataatcattagccaaagatcaactctctaatggtgctaatggcaatctagctaatgtgcaaatttaggaagtcttcagtactaagtacataattttcaaataatattttttaattgtctactttggatgttagctatgtcttgtgagtataaattccaattttaagcactattttgatgcaaaaaaatgaataaaaaatttaatttaaaaaaaaaaaaaa

SEQ ID NO: 1496 - protein, 265 aa, Homo sapien
MACAEFSFHVPSLEELAGVMQKGLKDNFADVQVSVVDCPDLTKEPFTFPVKGICGKTRIAEVGGVPYLLPLVNQKKVYDLNKIAKEIKLPGAFILGAGAGPFQTLGFNSEFMPVIQTESEHKPPVNGSYFAHVNPADGGCLLEKYSEKCHDFQCALLANLFASEGQPGKPAEFSSCPLNSDEEVNKWLHFYEMKAPLVCLPVFVSRDPGFDLRLEHTHFFSRHGEGGHYHYDTTPDIVEYLGYFLPAEFLYRIDQPKETHSIGRD

SEQ ID NO: 1497 - DNA, 2263 bp, Homo sapien
cggagcccctcggcggcgcccggcccaggacccgcctaggagcgcaggagccccagcgcagagaccccaacgccgagacccccgccccggccccgccgcgcttcctcccgacgcagagcaaaccgcccagagtagaagatggattggggcacgctgcagacgatcctggggggtgtgaacaaacactccaccagcattggaaagatctggctcaccgtcctcttcatttttcgcattatgatcctcgttgtggctgcaaaggaggtgtggggagatgagcaggccgactttgtctgcaacaccctgcagccaggctgcaagaacgtgtgctacgatcactacttccccatctcccacatccggctatgggccctgcagctgatcttcgtgtccacgccagcgctcctagtggccatgcacgtggcctaccggagacatgagaagaagaggaagttcatcaagggggagataaagagtgaatttaaggacatcgaggagatcaaaacccagaaggtccgcatcgaaggctccctgtggtggacctacacaagcagcatcttcttccgggtcatcttcgaagccgccttcatgtacgtcttctatgtcatgtacgacggcttctccatgcagcggctggtgaagtgcaacgcctggccttgtcccaacactgtggactgctttgtgtcccggcccacggagaagactgtcttcacagtgttcatgattgcagtgtctggaatttgcatcctgctgaatgtcactgaattgtgttatttgctaattagatattgttctgggaagtcaaaaaagccagtttaacgcattgcccagttgttagattaagaaatagacagcatgagagggatgaggcaacccgtgctcagctgtcaaggctcagtcgccagcatttcccaacacaaagattctgaccttaaatgcaaccatttgaaacccctgtaggcctcaggtgaaactccagatgccacaatggagctctgctcccctaaagcctcaaaacaaaggcctaattctatgcctgtcttaattttctttcacttaagttagttccactgagaccccaggctgttaggggttattggtgtaaggtactttcatattttaaacagaggatatcggcatttgtttctttctctgaggacaagagaaaaaagccaggttccacagaggacacagagaaggtttgggtgtcctcctggggttctttttgccaactttccccacgttaaaggtgaacattggttctttcatttgctttggaagttttaatctctaacagtggacaaagttaccagtgccttaaactctgttacactttttggaagtgaaaactttgtagtatgataggttattttgatgtaaagatgttctggataccattatatgttccccctgtttcagaggctcagattgtaatatgtaaatggtatgtcattcgctactatgatttaatttgaaatatggtcttttggttatgaatactttgcagcacagctgagaggctgtctgttgtattcattgtggtcatagcacctaacaacattgtagcctcaatcgagtgagacagactagaagttcctagtgatggcttatgatagcaaatggcctcatgtcaaatatttagatgtaattttgtgtaagaaatacagactggatgtaccaccaactactacctgtaatgacaggcctgtccaacacatctcccttttccatgactgtggtagccagcatcggaaagaacgctgatttaaagaggtcgcttgggaattttattgacacagtaccatttaatggggaggacaaaatggggcaggggagggagaagtttctgtcgttaaaaacagatttggaaagactggactctaaattctgttgattaaagatgagctttgtctacttcaaaagtttgtttgcttaccccttcagcctccaattttttaagtgaaaatataactaataacatgtgaaaagaatagaagctaaggtttagataaatattgagcagatctataggaagattgaacctgaatattgccattatgcttgacatggtttccaaaaaatggtactccacatacttcagtgagggtaagtattttcctgttgtcaagaatagcattgtaaaagcattttgtaataataaagaatagctttaatgatatgcttgtaactaaaataattttgtaatgtatcaaatacatttaaaacattaaaatataatctctataataaaaaaaaaaaaaaa

SEQ ID NO: 1498 - protein, 226 aa, Homo sapien
MDWGTLQTILGGVNKHSTSIGKIWLTVLFIFRIMILVVAAKEVWGDEQADFVCNTLQPGCKNVCYDHYFPISHIRLWALQLIFVSTPALLVAMHVAYRRHEKKRKFIKGEIKSEFKDIEEIKTQKVRIEGSLWWTYTSSIFFRVIFEAAFMYVFYVMYDGFSMQRLVKCNAWPCPNTVDCFVSRPTEKTVFTVFMIAVSGICILLNVTELCYLLIRYCSGKSKKPV

SEQ ID NO: 1499 - DNA, 1589 bp, Homo sapien
ggcacgaggtgggcgcggtagcgagcgccagcgtgtgcgccctggtggcgggggtggtgctggctcagtacatattcaccttgaagaggaagacggggcggaagaccaagatcatcgagatgatgccagaattccagaaaagttcagttcgaatcaagaaccctacaagagtagaagaaattatctgtggtcttatcaaaggaggagctgccaaacttcagataataacggactttgatatgacactcagtagattttcatataaagggaaaagatgcccaacatgtcataatatcattgacaactgtaagctggttacagatgaatgtagaaaaaagttattgcaactaaaggaaaaatactacgctattgaagttgatcctgttcttactgtagaagagaagtacccttatatggtggaatggtatactaaatcacatggtttgcttgttcagcaagctttaccaaaagctaaacttaaagaaattgtggcagaatctgacgttatgctcaaagaaggatatgagaatttctttgataagctccaacaacatagcatccccgtgttcatattttcggctggaatcggcgatgtactagaggaagttattcgtcaagctggtgtttatcatcccaatgtcaaagttgtgtccaattttatggattttgatgaaactggggtgctcaaaggatttaaaggagaactaattcatgtatttaacaaacatgatggtgccttgaggaatacagaatatttcaatcaactaaaagacaatagtaacataattcttctgggagactcccaaggagacttaagaatggcagatggagtggccaatgttgagcacattctgaaaattggatatctaaatgatagagtggatgagcttttagaaaagtacatggactcttatgatattgttttagtacaagatgaatcattagaagtagccaactctattttacagaagattctataaacaagcattctccaagaagacctctctcctgtgggtgcaattgaactgttcatccgttcatcttgctgagagacttatttataatatatccttactctcgaagtgttccctttgtataactgaagtattttcagatatggtgaatgcattgactggaagctccttttctccacctctctcaacacactcctcaccgtatcttttaacccatttaaaaaaaaaaatcttaaagccaaaattagaaaaataactccctacttttccaaagtgaattttgtagtttaatgttatcatgcagcttttgaggagtcttttacactgggaaagtttgtagaaattttaaaataagttttatgaaatggtgaaataatatgcatgattttaagtattgccatttttgtaatttgggttattatgctgatggtatcaccatctcttgaaattgtgttaggtttggttattttgtctggggaaaaaatatttactggaaaagactagcagttagtgttggaaaaacctggtggtgtttacaatgttgctaatcattacaaaacattctatattgaagcactgataataaatatgaaatgcaaaaaaaaaaaaaaaaaa

SEQ ID NO: 1500 - protein, 286 aa, Homo sapien
MMPEFQKSSVRIKNPTRVEEIICGLIKGGAAKLQIITDFDMTLSRFSYKGKRCPTCHNIIDNCKLVTDECRKKLLQLKEKYYAIEVDPVLTVEEKYPYMVEWYTKSHGLLVQQALPKAKLKEIVAESDVMLKEGYENFFDKLQQHSIPVFIFSAGIGDVLEEVIRQAGVYHPNVKVVSNFMDFDETGVLKGFKGELIHVFNKHDGALRNTEYFNQLKDNSNIILLGDSQGDLRMADGVANVEHILKIGYLNDRVDELLEKYMDSYDIVLVQDESLEVANSILQKIL

SEQ ID NO: 1501 - DNA, 1681 bp, Homo sapien
ggcacgaggatacctcctcatcaactctgacatagtgtgcgaacaggacatctacgagtggactaagatcaatggccggcggcgggtgccgcgcggggggcgggcggcgcggagtaggtggcggcggccatggccgaggcgtcgccgcatcccggacggtacttctgccactgctgctccgtggagatcgtcccgcgcctgccggattatatctgtccaagatgcgagtctggttttatcgaggagcttccggaagagaccaggagcacagaaaatggttctgccccctccacagctcccacagaccagagccggccaccgctggagcacgtggaccagcacctgttcacgctgccgcagggctacggacagtttgctttcggcatcttcgatgacagcttcgagatccccacgttccctcctggggcgcaggctgacgacggcagggaccctgagagccggcgggagagagaccatccgtcccggcaccggtacggcgcccgacagccccgcgcccgcctcaccacgcggcgggccaccggccggcacgaaggcgtccccacgctggaagggatcatccagcagctcgtcaacggcatcatcacgcccgccaccatccccagcctgggcccctggggagtcctgcactcaaaccctatggactacgcctggggggccaacggcctggatgccatcatcacacagctcctcaatcagtttgaaaacacaggccccccaccggcagataaagagaaaatccaggccctccccaccgtccccgtcactgaggagcacgtaggctccgggctcgagtgccctgtgtgcaaggacgactacgcgctgggtgagcgtgtgcggcagctgccctgcaaccacctgttccacgacggctgcatcgtgccctggctggagcagcacgacagctgccccgtctgccgaaaaagcctcacgggacagaacacggccacgaacccccctggcctcactggggtgagcttctcctcctcgtcgtcatcgtcctcctccagctcgcccagcaacgagaacgccacaagcaactcgtgagcccacgtcggccgtcgggaaagcacggggcctttcccacccaccctcagccagcgccacacggcacccacagactgggtgccccggcggcgccacgcttggctggtcagcgctgcaggtcccgcctgttccagggcaggacccgggcccggcccaccggccccctggcttgggaaggcgtgggccacatggtcccctctggggcgtccccagcctccccgtcctctgtctaacctcaccctctaaacgttcagcggtggaaagatttttataattttaaattattactgctttgaaataaacggacgtttgagctcacgtggcggccatgcatggtttgtggcggaagacggggcccagcggctcccccagcgctgaagcacggggttcagcggctcccccagtgctgcaggtgccgccaggacgggccacgtgggcccccagcctccccctcggccgcctccacgacccggagtaggggggctcgggaccatgaggatgaccagcaaaattcaagaacaaaactgctccaacagacttttttaaaggaaaaaatatgtgtatcttgaaagctatttaaaatacactacttacaaagaaaaaaaaaaaaaaaaaa

SEQ ID NO: 1502 - protein, 311 aa, Homo sapien
MAEASPHPGRYFCHCCSVEIVPRLPDYICPRCESGFIEELPEETRSTENGSAPSTAPTDQSRPPLEHVDQHLFTLPQGYGQFAFGIFDDSFEIPTFPPGAQADDGRDPESRRERDHPSRHRYGARQPRARLTTRRATGRHEGVPTLEGIIQQLVNGIITPATIPSLGPWGVLHSNPMDYAWGANGLDAIITQLLNQFENTGPPPADKEKIQALPTVPVTEEHVGSGLECPVCKDDYALGERVRQLPCNHLFHDGCIVPWLEQHDSCPVCRKSLTGQNTATNPPGLTGVSFSSSSSSSSSSSPSNENATSNS

SEQ ID NO: 1503 - DNA, 2952 bp, Homo sapien
cagtttcattaggctctgaagccattacaaaggttgcttaacttctaattatttgatcactgaggaaaatccagaaagctacacaacactgaaggggtgaaataaaagtccagcgatccagcgaaagaaaagagaagtgacagaaacaactttacctggactgaagataaaagcacagacaagagaacaatgccctggacatggctccagagatccacatgacaggcccaatgtgcctcattgagaacactaatggggaactggtggcgaatccagaagctctgaaaatcctgtctgccattacacagcctgtggtggtggtggcaattgtgggcctctaccgcacaggaaaatcctacctgatgaacaagctagctgggaagaataagggcttctctctgggctccacagtgaaatctcacaccaaaggaatctggatgtggtgtgtgcctcaccccaaaaagccagaacacaccttagtcctgcttgacactgagggcctgggagatgtaaagaagggtgacaaccagaatgactcctggatcttcaccctggccgtcctcctgagcagcactctcgtgtacaatagcatgggaaccatcaaccagcaggctatggaccaactgtactatgtgacagagctgacacatcgaatccgatcaaaatcctcacctgatgagaatgagaatgaggattcagctgactttgtgagcttcttcccagattttgtgtggacactgagagatttctccctggacttggaagcagatggacaacccctcacaccagatgagtacctggagtattccctgaagctaacgcaaggtaacaggaagcttgcccagcttgagaaactacaagatgaagagctggaccctgaatttgtgcaacaagtagcagacttctgttcctacatctttagcaattccaaaactaaaactctttcaggaggcatcaaggtcaatgggccttgtctagagagcctagtgctgacctatatcaatgctatcagcagaggggatctgccctgcatggagaacgcagtcctggccttggcccagatagagaactcagccgcagtgcaaaaggctattgcccactatgaccagcagatgggccagaaggtgcagctgcccgcagaaaccctccaggagctgctggacctgcacagggttagtgagagggaggccactgaagtctatatgaagaactctttcaaggatgtggaccatctgtttcaaaagaaattagcggcccagctagacaaaaagcgggatgacttttgtaaacagaatcaagaagcatcatcagatcgttgctcagctttacttcaggtcattttcagtcctctagaagaagaagtgaaggcgggaatttattcgaaaccagggggctattgtctctttattcagaagctacaagacctggagaaaaagtactatgaggaaccaaggaaggggatacaggctgaagagattctgcagacatacttgaaatccaaggagtctgtgaccgatgcaattctacagacagaccagattctcacagaaaaggaaaaggagattgaagtggaatgtgtaaaagctgaatctgcacaggcttcagcaaaaatggtggaggaaatgcaaataaagtatcagcagatgatggaagagaaagagaagagttatcaagaacatgtgaaacaattgactgagaagatggagagggagagggcccagttgctggaagagcaagagaagaccctcactagtaaacttcaggaacaggcccgagtactaaaggagagatgccaaggtgaaagtacccaacttcaaaatgagatacaaaagctacagaagaccctgaaaaaaaaaaccaagagatatatgtcgcataagctaaagatctaaacaacagagcttttctgtcatcctaacccaaggcataactgaaacaattttagaatttggaacaagtgtcactatatttgataataattagatcttgcatcataacactaaaagtttacaagaacatgcagttcaatgatcaaaatcatgttttttccttaaaaagattgtaaattgtgcaacaaagatgcatttacctctgtaccaacagaggagggatcatgagttgccaccactcagaagtttattcttccagacgaccagtggatactgaggaaagtcttaggtaaaaatcttgggacatatttgggcactggtttggccaagtgtacaataggtcccaatatcagaaacaaccatcctagcttcctagggaagacagtgtacagttctccattatatcaaggctacaaggtctatgagcaataatgtgatttctggacattgcccatggataattctcactgatggatctcaagctaaagcaaaccatcttatacagagatctagaatcttatattttccataggaaggtaaagaaatcattagcaagagtaggaattgaatcataaacaaattggctaatgaagaaatcttttctttcttgttcaattcatctagattataaccttaatgtgacacctgagacctttagacagttgaccctgaattaaatagtcacatggtaacaattatgcactgtgtaattttagtaatgtataacatgcaatgatgcactttaactgaagatagagactatgttagaaaattgaactaatttaattatttgattgttttaatcctaaagcataagttagtcttttcctgattcttaaaggtcatacttgaaatcctgccaattttccccaaagggaatatggaattttttttgactttcttttgagcaataaaataattgtcttgccattacttagtatatgtagacttcatcccaattgtcaaacatcctaggtaagtggttgacatttcttacagcaattacagattatttttgaactagaaataaactaaactagaaacaaaaaaaaaaaaaaaaaaa

SEQ ID NO: 1504 - protein, 563 aa, Homo sapien
MAPEIHMTGPMCLIENTNGELVANPEALKILSAITQPVVVVAIVGLYRTGKSYLMNKLAGKNKGFSLGSTVKSHTKGIWMWCVPHPKKPEHTLVLLDTEGLGDVKKGDNQNDSWIFTLAVLLSSTLVYNSMGTINQQAMDQLYYVTELTHRIRSKSSPDENENEDSADFVSFFPDFVWTLRDFSLDLEADGQPLTPDEYLEYSLKLTQGNRKLAQLEKLQDEELDPEFVQQVADFCSYIFSNSKTKTLSGGIKVNGPCLESLVLTYINAISRGDLPCMENAVLALAQIENSAAVQKAIAHYDQQMGQKVQLPAETLQELLDLHRVSEREATEVYMKNSFKDVDHLFQKKLAAQLDKKRDDFCKQNQEASSDRCSALLQVIFSPLEEEVKAGIYSKPGGYCLFIQKLQDLEKKYYEEPRKGIQAEEILQTYLKSKESVTDAILQTDQILTEKEKEIEVECVKAESAQASAKMVEEMQIKYQQMMEEKEKSYQEHVKQLTEKMERERAQLLEEQEKTLTSKLQEQARVLKERCQGESTQLQNEIQKLQKTLKKKTKRYMSHKLKI

SEQ ID NO: 1505 - DNA, 2865 bp, Homo sapien
attgctggcctaggtgaaactgacggtctccattagaaacatggctgcgaccagtctagtgggtatttgtagaagagcctcagcgttcctgaaggcagcttgttccctagtaaatcccaaggacgctgctcactcgggttgcaggtcttctcttagtttgttgcctaagagtacaccaaatgtgacatcctttcaccaatatagattacttcataccacattgtcaaggaaaggactagaagaattttttgatgacccaaaaaactgggggcaagaaaaagtaaaatctggagcagcatggacctgtcagcaactaaggaacaaaagtaatgaagatttacacaaactttggtatgtcttactgaaagaaagaaacatgcttctaaccctagagcaggaggccaagcggcagagattgccaatgccaagtccagagcggttagataaggtagtagattccatggatgcattagataaagttgtccaggaaagagaagatgccctaaggcttcttcagactggtcaagaaagagctagacctggtgcttggagaagagacatctttggaagaatcatctggcacaagttcaagcagtgggttataccttggcacctaaataaaagatacaataggaaacgattctttgccttgccttatgtggaccattttctcagactggaacgtgagaaacgagcccgcatcaaagcacggaaggaaaatttagagagaaagaaagcaaaaattcttttaaaaaagtttccacatcttgctgaagcccaaaagtcaagtcttgtctaagatgtctgaactattaaatttaccattttgtttttcttgaatagtctgtgtacaggagtaaatatgttaagtggtttataaagaaattctgtttttagtcaagtgactttactaatcagttgttctaagtgtgaatatggcatgctaattagctaatttggtagaagctaatttgcttctaaaaatcaggtataaagttcagatgagattcccactttataaattctgacatttaagcaggctttaaatgtcacctgctaccttagagtgtgaaggtgatggtaactgccacagcaaaggcaataccgtagtttttgaatttgaataatagttttacctctgttgttaataggctatgaagaggatgtgggtattgctgttaataaacggaggactttgattcaaaataatgagaaatacatttagtccttaaagtagtaatcacagtgcacaacagtccaaaatatatttctggaatggctaatttttatttaattctgtaagcctaaggtaaaaagcataggcagtaacttttactagtcaataaaaagcagttctaccaatccactggtaattaatacactaaacagagttggaaagcattttactgaaagcaaaatatttagagaaaatagacatttatacaaaattataaaatgcttgtaataagaataagtgcatttcaaggaaagcacaaacttaatttatagagccagttaaagctttaaaaaatttaagtggaaattgaaatatgcaaaaatgtataaacattctacaaaagatggtcattcttttcctgagtatactaaagctatgaaacgtaaggtgacaaaaggaaggtagaagcttgggaactctttctcaagggcattttctttctacacactgcttccctccttcttcatattcttgcttggaaatccacatcccaacacttgtggtgacaacatgactgactcctaacattgtgtttcctgataaccccttcacattggaagggtcaaataatccttctggaatctttagccgctctgcaccaaaatcacaattgtagccattggggaattcataatgaacagttggcatctgtgcagccacttgttcatcataagttgaatctgacacttgaagtaccgaagcttgaaaatcctggataacacaattacacatataattgtgccaagacctcgtaacctgaggcaacttctcttttcttttccagtttgctggagatccttcacgaacagcttcttttgatgcaatcatatatggaggaaccaattcaatattcatttcttggaagagttctctgcactgcatagtaataaagtctccagcaagaggggatttcacaatgccttgttgaaggacatagccatcgtggactggaattgcagtggtatgagtggctccactgtccaaaatcagcccagtagaacgaccattagcaaatgctgtcaaaactgcagttttgcaaaggaagaaggcagggatgttgtagtgttcaaacattaactctgtcagtttctctctctttgctctagtattccacggtgcctctgacatgagaacaggatggagactggcttctgatttgacatgcattttgtaggtatgatccaaaatagcttggaaactatcccagtcttcaaccatcccattttttagaggtgaaatggcctccatattctccctcggaacacgcagagcattagtatctatgtagtaggtgggaccgccttgtttgcctttatcgccatctatttccattaatgtgcttccgtcatctctttctaccaccataccaatagctgtaggaaaatccaccttggggcagtcctcaccagcataaccagctctcacagtataggatccaatgtcaaaaacaagggctccaacttcatctcccccgtaccacgccgccgctcatggctgctgccggcgcgactcctaccctaagggctaactggcgaagtgactgcagtggccgcgactgcgagtctcgaggagcgatagcccctgactcccttaacttccaccgccacccacctcaggcaacaaagcgg

SEQ ID NO: 1506 - protein, 252 aa, Homo sapien [sequence omitted]

SEQ ID NO: 1507 - DNA, 886 bp, Homo sapien
gtcggttccgggcgttaccatcgtccgtgcgcaccgcccggcgtccaggtgagtctcccatctgcagagacgcggacgcgccggcccgcagttggcctgcggagcgcggtggacggtttggcgcccaccaggcgatcaatactttggatttttaatttctagatttggcaattcttcgctgaagtcatcatgagctttttccaactcctgatgaaaaggaaggaactcattcccttggtggtgttcatgactgtggcggcgggtggagcctcatctttcgctgtgtattctctttggaaaaccgatgtgatccttgatcgaaaaaaaaatccagaaccttgggaaactgtggaccctactgtacctcaaaagcttataacaatcaaccaacaatggaaacccattgaagagttgcaaaatgtccaaagggtgaccaaatgacgagccctcgcctctttcttctgaagagtactctataaatctagtggaaacatttctgcacaaactagattctggacaccagtgtgcggaaatgcttctgctacatttttagggtttgtctacattttttgggctctggataaggaattaaaggagtgcagcaataactgcactgtctaaaagtttgtgcttattttcttgtaaatttgaatattgcatattgaaatttttgtttatgatctatgaatgtttttcttaaaatttacaaagctttgtaaattagattttctttaataaaatgccatttgtgcaagatttctcaaagattaggtatatatttaaatggaagagaaaatatttttatgggagaaaaatacatttgaaccatgaaatttcatcttttaaataacatccagtacagatatctgtgtaaaaaaaaaaaaaa

SEQ ID NO: 1508 - protein, 83 aa, Homo sapien
MSFFQLLMKRKELIPLVVFMTVAAGGASSFAVYSLWKTDVILDRKKNPEPWETVDPTVPQKLITINQQWKPIEELQNVQRVTK

SEQ ID NO: 1509 - DNA, 4049 bp, Homo sapien
atgccggtgcagctgacgacagccctgcgtgtggtgggcaccagcctgtttgccctggcagtgctgggtggcatcctggcagcctatgtgacgggctaccagttcatccacacggaaaagcactacctgtccttcggcctgtacggcgccatcctgggcctgcacctgctcattcagagcctttttgccttcctggagcaccggcgcatgcgacgtgccggccaggccctgaagctgccctccccgcggcggggctcggtggcactgtgcattgccgcataccaggaggaccctgactacttgcgcaagtgcctgcgctcggcccagcgcatctccttccctgacctcaaggtggtcatggtggtggatggcaaccgccaggaggacgcctacatgctggacatcttccacgaggtgctgggcggcaccgagcaggccggcttctttgtgtggcgcagcaacttccatgaggcaggcgagggtgagacggaggccagcctgcaggagggcatggaccgtgtgcgggatgtggtgcgggccagcaccttctcgtgcatcatgcagaagtggggaggcaagcgcgaggtcatgtacacggccttcaaggccctcggcgattcggtggactacatccaggtgtgcgactctgacactgtgctggatccagcctgcaccatcgagatgcttcgagtcctggaggaggatccccaagtagggggagtcgggggagatgtccagatcctcaacaagtacgactcatggatttccttcctgagcagcgtgcggtactggatggccttcaacgtggagcgggcctgccagtcctactttggctgtgtgcagtgtattagtgggcccttgggcatgtaccgcaacagcctcctccagcagttcctggaggactggtaccatcagaagttcctaggcagcaagtgcagcttcggggatgaccggcacctcaccaaccgagtcctgagccttggctaccgaactaagtataccgcgcgctccaagtgcctcacagagacccccactaagtacctccggtggctcaaccagcaaacccgctggagcaagtcttacttccgggagtggctctacaactctctgtggttccataagcaccacctctggatgacctacgagtcagtggtcacgggtttcttccccttcttcctcattgccacggttatacagcttttctaccggggccgcatctggaacattctcctcttcctgctgacggtgcagctggtgggcattatcaaggccacctacgcctgcttccttcggggcaatgcagagatgatcttcatgtccctctactccctcctctatatgtccagccttctgccggccaagatctttgccattgctaccatcaacaaatctggctggggcacctctggccgaaaaaccattgtggtgaacttcattggcctcattcctgtgtccatctgggtggcagttctcctggaggggctggcctacacagcttattgccaggacctgttcagtgagacagagctagccttccttgtctctggggctatactgtatggctgctactgggtggccctcctcatgctatatctggccatcatcgcccggcgatgtgggaagaagccggagcagtacagcttggcttttgctgaggtgtgacatggcccccaagcagagcgggtaaagtgcaatgggtaagggagggaaggggaatggaagagaaaagacagggtgggagggaggagggagtgctgtgttttagtctcttaatggtccaaaggacaaatctaaaatgcaaagaacggtgatgtagtatggcctgacagctctgtttagaggaggcaacactgatcccccagatgcagggctgcaggggattctgtgttttcagactgcctgtctgcttgcatctgcacataggcagtagcctcctcctgggctccagagggcactcagaagttgtgctaaaccaagttaagtcccattcagtggcaacttgtgataggtacctgagtgacggcaacctgcggaaggaggttctcccagcccatctgaacacaaccagaggtggcaggagaatttctactgagcgaggtgggccggttagtgtatgtcacccccaccccacccataagtagtcatcaatgcaataagattgcgcgtgagatacaaggcccagaagcctgatctttgggcatcagaaaacagggtccaggaatggtgctttatgtgagataccccactccacatcaacattccagggatgagccaaaccagcagggagttagcactgaactgcttttaaaagtgcacattaaaaaggaaagtttgccaggaggaacaaagagattgtggtggtgctaaaggaggccataagctacacagaggccttgggtgttccacctggaaactgctcagacgtctagatgggttcttagcttgtctgtgatctctgctggggagataaaaagattaagccccaacatgttcagaaaagaagtgaagtcttgggtattttaacctgtatactcttgaattcctctcaaattcagctctgatctgaggctaagacacactccccacttcactttcttcaaagccacattttttgaggtatcactgcagtcacctcttctaccctcatcatcataggtaaggttttcaaggtggcaattggggcggagccccggcttcttatagaagcttcagcaggaggcaagcgtgttctcagcacatatgggaactatgaggagcctctgatcaaattggctacaatcttggagctgcttggacggattccttggcagccgggttagcatgtgtgactttcaggctactgttcttgacaatcatctccaatggaaagcttttcagtgttcccaaagtgaactctcaaatccaaaatggttatctttgagaccatccattctcctcagtggcttctccagggaattcttacagccaagttgtgacagtcactgcatttgcctgcttctttccagaaaccaaactaggagatgaaactggttcctacatcctaaggttcttgctttctctctcatgcctcctgaggctgtttttggctgttttccctctgctgcttttggggaatgaggggaagccattttccaagtgacttgcaatccaggctgttctcagcgttttgagtttaaaacctgggatcctgactaagcctttgacttaagggttgcttgcttgccctccaaatgtcctttctcaaaggggccaactaacccgtgcagaaccagcactaaggtggacagcagacaagagggcaagcctctaatgtaccaagtgcttcctacaaagacgcaaggtgtgctccgaaccacagatgggcaaaccctggtgctttccttcatctcccacgaactcaagggttttccaagtgtagctaacagttgccacatcacacagacctccagtttctggtaagactgctggttgacatcagacccaacccattgaaggctggaaggcagcaggcatttgctaaggcagctgatccaggcaatcgttctgctggccaagaagttaaactattttgagcattagaatggaggaaatccggtcagccaagtgcagagttcagacttcgctaagggcttgtttttcttcagcatttacttgaagattaatgtaggatgacaggctctcctggctgtcctaccatcagctctgccttgcactgtggtcgtcaactttcctcaaatcaaaaacaggcaggtacaggtagtgggctcacaacgtttgacctcgactggtttttctaagttattttgtacatttttcagcagcaaaaccaaactgggtcttcagctttatccccgtttcttgcaagggaagagcctttatacaattggacgcattttggtttttcctcattgagaattcaaatcctcttttgtattgtttctacaataatttgtaaacatatttatttttacctgcttttttttttttttttaattttcaggtcaagttttttatactgcacttatttgtcaaaataaagattctcacat

SEQ ID NO: 1510 - protein, 553 aa, Homo sapien
MPVQLTTALRVVGTSLFALAVLGGILAAYVTGYQFIHTEKHYLSFGLYGAILGLHLLIQSLFAFLEHRRMRRAGQALKLPSPRRGSVALCIAAYQEDPDYLRKCLRSAQRISFPDLKVVMVVDGNRQEDAYMLDIFHEVLGGTEQAGFFVWRSNFHEAGEGETEASLQEGMDRVRDVVRASTFSCIMQKWGGKREVMYTAFKALGDSVDYIQVCDSDTVLDPACTIEMLRVLEEDPQVGGVGGDVQILNKYDSWISFLSSVRYWMAFNVERACQSYFGCVQCISGPLGMYRNSLLQQFLEDWYHQKFLGSKCSFGDDRHLTNRVLSLGYRTKYTARSKCLTETPTKYLRWLNQQTRWSKSYFREWLYNSLWFHKHHLWMTYESVVTGFFPFFLIATVIQLFYRGRIWNILLFLLTVQLVGIIKATYACFLRGNAEMIFMSLYSLLYMSSLLPAKIFAIATINKSGWGTSGRKTIVVNFIGLIPVSIWVAVLLEGLAYTAYCQDLFSETELAFLVSGAILYGCYWVALLMLYLAIIARRCGKKPEQYSLAFAEV

SEQ ID NO: 1511 - DNA, 2226 bp, Homo sapien
ggcagcatggcgtctttccggcttctccaaacccttgcgaaaaactttattggcaaagctatcagagaacggacagtgtacccactgaggcggccaaagcttaactggatcagggcaggatgacatgaccttgtggtagatcccagaactgaggccccaggatgacagaacaggagaccctggccctactggaagtgaagaggtctgattccccagagaagagctcaccccaggccttggttcccaatggccggcagccagaaggggaaggtggggccgaatccccgggagctgagtccctcagagtggggtcttcagctggatctcccacagccatagagggggctgaggatggtctagacagcacagtaagtgaggctgccaccttgccctgggggactggccctcagcccagtgctccgttcccggatccccctggctggcgggacattgaaccagagccccctgagtcagaaccacttaccaagctagaggagctgcccgaagacgatgccaacctgctgcctgagaaagcggcccgtgccttcgtgcctattgacctacagtgcattgagcggcagccccaagaagaccttatcgtgcgctgtgaggcaggcgagggcgagtgccgaaccttcatgcccccccgggtcacccaccccgaccccactgagcgcaagtgggctgaggcagtggtgaggccgcctggctgttcctgtgggggctgcgggagctgtggagaccgtgagtggctaagggctgtggcctccgtgggagccgcactcattctcttcccttgcctactatacggggcatatgccttcctgccgtttgatgtcccacggctgcccaccatgagttcccgcctgatctacacactgcgctgcggggtctttgccaccttccccattgtgctggggatcctggtgtacgggctgagcctgttatgcttttctgcccttcggccctttggggagccacggcgggaggtggagatccaccggcgatatgtggcccagtcggtccagctctttattctctacttcttcaacctggccgtgctttccacttacctgccccaggataccctcaaactgctccctctgctcactggtctctttgccgtctcccggctgatctactggctgacctttgccgtgggccgctccttccgaggcttcggctacggcctgacgtttctgccactgctgtcgatgctgatgtggaacctctactacatgttcgtggtggagccggagcgcatgctcactgccaccgagagccgcctggactacccggaccacgcccgctcggcctccgactacaggccccgcccctggggctgagcctctccgccctcgccctcggagtagggggtagcggcttgggtctgacacatctttgaaccttgtggccaggcctggacttcgcccccaggcctaggaccgcggtgggtggaaccctgctactgccccaacagggactccaatcaatcggagttctccccttgccggagctgcccttcacctttggggcccgagacagtcataagggatggacttagttttcttgcagggaaaaaggtggacagccgtgtttcttaaggatgctgagggcatggggccaggaccaggggagaggcacagctccttcctgagcagcctctcaccactgccacaaggctccctaatgctggtctctgctccactccccggcttcccgtgaggcaggaggcagagccacagccaaggccctgaccacttctgtgccagttgtctaagcagagcgcctcagggacgctggaaatgccttaaggatagaggctgggcatcacatcaaatgggactgtggtgtttggtgaaaaccttcctgaggatctggattcaggaccctccatgactggcctatttactgtttacagctggccagtgcagagctgctgctcttttacctttttaggcccctgtaacttcccacctttaaactgcccagaaggcatgcctctcccacaggaagaggggagcagacagggaaatctgcctaccaagaggggtgtgtgtgtctttgtgcccacacgtggtggctggggagtgcctggatggtgcggtggttgatgttaacctagtgtgtgtgtgtgtgtgtgtgtgtgtgtgtgtaacaataaattactaccagtcaaaaaaaaaaaaaaaaaaaaaaaaaaaaaaaaaaaaaaaaaaaaaaaaa

SEQ ID NO: 1512 - protein, 394 aa, Homo sapien
MTEQETLALLEVKRSDSPEKSSPQALVPNGRQPEGEGGAESPGAESLRVGSSAGSPTAIEGAEDGLDSTVSEAATLPWGTGPQPSAPFPDPPGWRDIEPEPPESEPLTKLEELPEDDANLLPEKAARAFVPIDLQCIERQPQEDLIVRCEAGEGECRTFMPPRVTHPDPTERKWAEAVVRPPGCSCGGCGSCGDREWLRAVASVGAALILFPCLLYGAYAFLPFDVPRLPTMSSRLIYTLRCGVFATFPIVLGILVYGLSLLCFSALRPFGEPRREVEIHRRYVAQSVQLFILYFFNLAVLSTYLPQDTLKLLPLLTGLFAVSRLIYWLTFAVGRSFRGFGYGLTFLPLLSMLMWNLYYMFVVEPERMLTATESRLDYPDHARSASDYRPRPWG

SEQ ID NO: 1513 - DNA, 1199 bp, Homo sapien
cacttgaccttccatcagtaagacggacttttctaatctgttcctggagatattaatggaatacagtcatgtccactcaagacgagaggcagatcaatactgaatatgctgtgtcattgttggaacagttgaaactgttttatgaacagcagttgtttactgacatagtgttaattgttgagggcactgaattcccttgtcataagatggttcttgcaacatgtagctcttatttcagggccatgtttatgagtggactaagtgaaagcaaacaaacccatgtacacctgaggaatgtcgatgctgccaccttacagataataataacttatgcatacacgggtaacttggcaatgaatgacagcactgtagaacagctttatgaaacagcttgcttcctacaggtagaagatgtgttacaacgttgtcgagaatatttaattaaaaaaataaatgcagagaattgtgtacgattgttgagttttgctgatctcttcagttgtgaggaattaaaacagagtgctaaaagaatggtggagcacaagttcactgctgtgtatcatcaggtcgcgttcatgcagctgtcacatgacctcctcatagacatcttcagcagcgacaacttaaatgtagaaaaggaggaaaccgttcgagaagctgctatgctgtggctagagtataacacagaatcacgatcccagtatttgtcttctgttcttagccaaatcagaattgatgcactttcagaagtaacacagagagcttggtttcaaggtctgccacccaatgataagtcagtggtggttcaaggtctgtataagtccatgcccaagtttttcaaaccaagacttgggatgactaaagaggaaatgatgattttcattgaagcatcttcagaaaatccttgtagtctttactcttctgtctgttacagcccccaagcagaaaaagtttacaagttatgtagcccaccagctgatttgcataaggttgggaccgttgtaactcctgataatgatatctacatagcagggggtcaagttcctctggaaaaacacaaaaacaaatcacagtaaaacaagcaaacttcagactgccttcagaactgtgaattgcttttattggtttgatgcacagcaaaatacctggtttccaaagaccccaatgctttttgtccgcataaagccatctttggtttg

SEQ ID NO: 1514 - protein, 335 aa, Homo sapien [sequence omitted]

SEQ ID NO: 1515 - DNA, 2659 bp, Homo sapien
ggcccatgcaagtccaaaattcagcagggcagtcaaattttaaacctccaaaatgatcacctttgactccacgtctcacaatcatctctctcaagttcgaagttccacaaatctctaaggcaagggaaagatgctgccagtctctttgctaaaacacagcaagagtcacctttactccagttcccaaaaagtttttcatctccatctgagaccacctcagcctgaattttattgtcaatattgctatcagcattttgggcaaagccattcagcaagtatctaggaagttccaaactttcccacattttcctgtcttcttctgagcccttcaaactgttccaacctctgcctgttacccagttccaaacttgctttcatatttttggctatcttttcagcaatgccccactctactgttagcagtttactgtattagtctgttttcacactgctgataaagacattcctcaagattgtgaagaaaaagaggtttaattggacttacagttccacatggccggggaggcctcagaatcatggcgggaggtgaaaagcacttcgtacatggtggtggcaagagaaaatgaagaagaagcaaaagtggaaacccctgataaacccatcagatctcatgagacttactatcatgagaatagcacaggaaagactggcccccctgattcgatgacctccccctgggtccctcccacaacatgtgggaattccagaagataaattcaagttgcaatttcagtggggacatagccaaaccaggcgccaggtagctcctgcccttagcccaggaggccatccctgcagcggggccacgggcatcggaaaagccatcgtgaaggagctcctggagctggggagtaatgtggtcattgcatcccgtaagttggagagattgaagtctgcggcagatgaactgcaggccaacctacctcccacaaagcaggcacgagtcattcccatacaatgcaacatccggaatgaggaggaggtgaataatttggtcaaatctaccttagatacttttggtaagatcaatttcttggtgaacaatggaggaggccagtttctttcccctgctgaacacatcagttctaagggatggcacgctgtgcttgagaccaacctgacgggtaccttctacatgtgcaaagcagttgaccagctaatctggcttctgtgtctttttgaaatggctcagacctgtttctccaagaagacctagttccctttagtagtttacagctcctggatgaaagagcatggaggatctatcgtcaatatcattgtccctactaaagctggatttccattagctgtgcattctggagctgcaagagcaggtgtttacaacctcaccaaatctttagctttggaatgggcctgcagtggaatacggatcaattgtgttgcccctggagttatttattcccagactgctgtggagaactatggttcctggggacaaagcttctttgaagggtcttttcagaaaatccccgctaaacgaattggtgttcctgaggaggtctcctctgtggtctgcttcctactgtctcctgcagcttccttcatcactggacagtcggtggatgtggatgggggccggagtctctatactcactcgtatgaggtaccagatcatgacaactggcccaagggagcaggggacctttctgttgtcaaaaagatgaaggagacctttaaggagaaagctaagctctgagctgaggaaacaaggtgtcctccatcccccagtgccttcacatcttgaggatatgcttctgtactttttaaaagcttatagttggtatggaaaacatttttcttatttttaagtgttattaattatatctatggaaaaactattcctgaaatatatacagtcttatgtcccaatcagagtcttttaacctatgatttaaaaatgtataagtaacagaaattaacatattttaatgactttactttttatttctaagaaaagtatttgaaaaatggaataattttaaatcaatgataattctagggatcatgaactcccagaagattttattatttaattgtaaaggtagaggccagacgcagtggctcacgcctgtaattccagcactttgggaggccgaggtaggcgggtcagttgaggtcaggagttcaagaccaggctggccaacatggtaaaaccctgtctctactgaaaaacaacaaaaacaaaaacacaaattagtcgggtgtggtggcacacacctgtagtcccaggtacttgggaggctgaggcaggaggatcgcttgaacccaggaagcagaggttgcagtgagctgagatcatgctactgcagtccagcctgggctacagagtgagactgcatctcaaaaaaaacccaaaaaacaaaaacaaacaacaacaacaaaattataaaggtagaaaataaacctaaattgtgtcgtaattaagattattaaaattagaattatacaatgacttatttttggtggcaaatactttaggagcaataatgccttatggtaattattgatgtatagtttcttttgtttatgaagtcaaatttgtataaattctcttaattcaaagaaaaagttttatgtgatttaaaaaaaaaaaaaaaaaaaaaaaaaaaaaaaaaaa

SEQ ID NO: 1516 - protein, 157 aa, Homo sapien
MKEHGGSIVNIIVPTKAGFPLAVHSGAARAGVYNLTKSLALEWACSGIRINCVAPGVIYSQTAVENYGSWGQSFFEGSFQKIPAKRIGVPEEVSSVVCFLLSPAASFITGQSVDVDGGRSLYTHSYEVPDHDNWPKGAGDLSVVKKMKETFKEKAKL

SEQ ID NO: 1517 - DNA, 2649 bp, Homo sapien
tatagtagtgggttaaacggcccgcccgggtagtcggaactgaactaggtgccagacggtccgaagcgggggccacgtcagcggggccacccagggctcgcggggtcccggtgggtgccatgcggaggggcgcgcttctggcgggcgccttggccgcgtacgccgcgtacctggtgctgggcgcgctgttggtggcgcggctggaggggccgcacgaagccaggctccgagccgagctggagacgctgcgggcgcagctgcttcagcgcagcccgtgtgtggctgcccccgccctggacgccttcgtggagcgagtgctggcggccggacggctggggcgggtcgtgcttgctaacgcttcggggtccgccaacgcctcggaccccgcctgggacttcgcctctgctctcttcttcgccagcacgctgatcaccaccgtgggctatgggtacacaacgccactgactgatgcgggcaaggccttctccatcgcctttgcgctcctgggcgtgccgaccaccatgctgctgctgaccgcctcagcccagcgcctgtcactgctgctgactcacgtgcccctgtcttggctgagcatgcgttggggctgggacccccggcgggcggcctgctggcacttggtggccctgttgggggtcgtagtgaccgtctgctttctggtgccggctgtgatctttgcccacctcgaggaggcctggagcttcttggatgccttctacttctgctttatctctctgtccaccatcggcctgggcgactacgtgcccggggaggcccctggccagccctaccgggccctctacaaggtgctggtcacagtctacctcttcctgggcctggtggccatggtgctggtgctgcagaccttccgccacgtgtccgacctccacggcctcacggagctcatcctgctgccccctccgtgccctgccagtttcaatgcggatgaggacgatcgggtggacatcctgggcccccagccggagtcgcaccagcaactctctgccagctcccacaccgactacgcttccatccccaggtagctggggcagcctctgccaggcttgggtgtgcctggcctgggactgaggggtccaggcgaccagagctggctgtacaggaatgtccacgagcacagcaggtgatcttgaggccttgccgtccaccgtctctcctttgtttcccagcatctggctgggatgtgaagggcagcactccctgtccccatgtcccgggctccactgggcaccaacataaccttgttctctgtcctttctctcatcctctttacactgtgtctctctggctctctggcattctcgctgcctctgtctttccctcttgctgtctctgtttctcattctctttcatgttccgtctgtgtctctcaattaaccactcgtcaactgctgattctactgggctgtgggctcagacctcatttcaggcaccagattggtcgctacaccctggacaagtgactgcccgtctctgagccttgatttcctcagctgccaaatgggaagaatagaagaatttgcccctaaacccctcctgtgtgctggccctgtgctagacagtgctggagacatagttgggggtggagaactgcccttatggagcttgcagtccagtgaggtggacagacctgtccccagacagtgatggcccaaaatggtcaggactttaatggaggaggtgaggtgttgaaagcacaggcagagtggtcagggctgaagtcggagaagcatagggactaggcccaatccagcctggaaagtcagggaggacttcctagaggaagggacatcgaactaagacctgaactatgagaaataggcaggaagaagttgtacctgactcatttttctcaggtgtctccagggagcaggacccatggagggacccctggtgtagcctgggcgatagactctttctcacagcctggcaggcaggaaacagacataggaccccaccccagatctgaatggcatgggaggtctgcccttaacccatggcaccattgtaagagctgtccacatttgtatgttgtgccctggaatcagcctggtttagctcaaatccccaaattagcccacgtctggcctgtgtccttgggcagtcacactacctctctgattttgtttccttatctgtaaaatggtgatcatcataatacaacttcaaaaggatttcaggctgagtgtggtggctcacgcctatacacccagcactttggaaggctgaggaaggaggatcgcttgaggccaggagtttgagactagcctaggcaacacagtgaggccttatctcaacaacaaccacaaaatctaaaaattagctgggtgtggtggtgcatgcctgtgatcctggctacttcagaggctgaggtggaaggatcacttgaggccaggagtttgaggctgcagtgagttatgatggcactgctgcactccagcctgcgggacagagtgagaccctgtctgaaagaaagagagaaagaaagaaagaaagagagagaaagaaagaaagaaagaaagggaaagatggaaggaaggaaggaaaaagaaagagaaagagagagagagagaaagaaaaagaaagaaaagtaagaaaaaaaaaaaaaaaaaa

SEQ ID NO: 1518 - protein, 313 aa, Homo sapien
MRRGALLAGALAAYAAYLVLGALLVARLEGPHEARLRAELETLRAQLLQRSPCVAAPALDAFVERVLAAGRLGRVVLANASGSANASDPAWDFASALFFASTLITTVGYGYTTPLTDAGKAFSIAFALLGVPTTMLLLTASAQRLSLLLTHVPLSWLSMRWGWDPRRAACWHLVALLGVVVTVCFLVPAVIFAHLEEAWSFLDAFYFCFISLSTIGLGDYVPGEAPGQPYRALYKVLVTVYLFLGLVAMVLVLQTFRHVSDLHGLTELILLPPPCPASFNADEDDRVDILGPQPESHQQLSASSHTDYASIPR

SEQ ID NO: 1519 - DNA, 1230 bp, Homo sapien
ccgtagtcaacgtgcgcctcccctcccggctcccagccgggcgcgccccgggctcgagtctctgcctgcccagtggcagccccgcccttcctctcccagtgggccctcggcgcccagctccgcgtcctgtgaggtccagtggccgcccaggcgcgaccagatctgggtgcgcggagagcgcgcatggcggctgtgggaccgcggaccggccccggaaccggcgccgaggctctagcgctggcggcagagctgcagggcgaggcgacgtgctccatctgcctagagctctttcgtgagccggtgtccgtcgagtgcggccacagcttctgccgcgcctgcatagggcgctgctgggagcgcccgggcgcggggtctgttggggccgccacccgcgcgccccccttcccactgccctgtccgcagtgccgcgagcccgcgcgccccagtcagctgcggcccaaccggcagctggcggcagtggccacgctcctgcggcgcttcagcctgcccgcggctgccccgggagagcacgggtctcaggcggccgcggcccgggcagcggctgcccgctgcgggcagcatggcgaacccttcaagctctactgccaggacgacggacgcgccatctgcgtggtgtgcgaccgcgcccgcgagcaccgcgagcacgccgtgctgccgctggacgaggcggtgcaggaggccaaggagctcttggagtccaggctgagggtcttgaagaaggaactggaggactgtgaggtgttccggtccacggaaaagaaggagagcaaggagctgctggtgagccaggcacccgcaggccccccgtgggacattacagaggcctgagaactcagcaccagggctcggtgtgtgtggtgttggagtgtgtgctatggaaccgcagaatcgatttcagaaagataatagagtccatattatatagggtgtccacataattgttgtacaaaccagagctttttaaagtgaaaagcagtgctaaaataattattgcaaaacaactggcttaaactggagctgtcccagcgaatcaggacgctcagtcactctgatattacgtaacataccagttagggcctgcggaagcatcttgtaatggaacacattactatttctgcagagaaacatggatattcaataagtgggaatattaatacaataaagagcctcatggcatgttttgtcaacaaaacagtagttgaaaaaaaa

SEQ ID NO: 1520 - protein, 221 aa, Homo sapien
MAAVGPRTGPGTGAEALALAAELQGEATCSICLELFREPVSVECGHSFCRACIGRCWERPGAGSVGAATRAPPFPLPCPQCREPARPSQLRPNRQLAAVATLLRRFSLPAAAPGEHGSQAAAARAAAARCGQHGEPFKLYCQDDGRAICVVCDRAREHREHAVLPLDEAVQEAKELLESRLRVLKKELEDCEVFRSTEKKESKELLVSQAPAGPPWDITEA

SEQ ID NO: 1521 - DNA, 2010 bp, Homo sapien
cgagctgccccggggtctctctggtttcctaatcagggcaacgccgcgggagagaacctttaccttggctgcactaagttctcggtgccactccctggcagggcgggaccttgtttaggccctgtgatcgcgcggttcgtagtagcgcaaggcgcagagtggaccttgacccgcctagggcgggaagagtttggcccgccgggtcccaaagggcagaatggacgggctcctaaatcccagggaatcctctaaattcattgcagaaaacagtcgggatgtgtttattgacagcggaggcgtacggagggtggcagagctgctgctggccaaggcggcggggccagagctgcgcgtggaggggtggaaagcccttcatgagctgaaccccagggcggccgacgaggccgcggtcaactgggtgttcgtgacagacacgctcaacttctccttttggtcggagcaggacgagcacaagtgtgtggtgaggtacagagggaaaacatacagtgggtactggtccctgtgcgccgccgtcaacagagccctcgacgaagggataccaataactagtgcctcgtactacgcgacagtgaccctggatcaggttcggaatatacttcgttctgacacagacgtttccatgcctttagtagaagagaggcatcggattctcaatgaaaccgggaaaattctgctggagaagtttggaggctcttttctcaactgcgtccgagaaagtgagaatagtgcgcagaagttaatgcacctggtggttgaaagttttccttcttacagagatgtgactctgtttgaggggaaaagagtttctttttacaaacgagcccaaatccttgtagcagatacgtggagtgtattggaaggaaaaggagatggctgcttcaaggacatctccagtatcaccatgtttgctgattatagattacctcaggttcttgctcatcttggagccctgaaatactctgatgacctactgaagaagcttctcaaaggagaaatgctctcatatggagacaggcaagaggtggaaatcagagggtgctcgctttggtgtgttgagctgatccgggattgtcttctggagcttattgaacaaaagggtgaaaaacctaatggagagatcaattccattcttctggattattacttatgggactatgcccatgaccatagggaagatatgaaaggaattccgtttcatcgcatacgttgcatatattattgacctcaagtgtaaactgatccaaagaaaaccccctgcgttttatatcatatcatctgtacagttttgctttgatatttagagaacatgatcgaggttataggaaattgattgcccattctcacttgaaaaatacttcctaggccgggcacagtggtttatgcctgtaatcccagcactgtgggaggctgaggcgggtggatcatctgaggtcaggagtttgagaccacctggccaacatggtgaaaccccatctctactaaaaatacaaaattagctgggcgtggtggcacgtgcctgtaatcccagttacttgggaggctgaggcaagagaatcgcttgaactcagaaggtggaggttgcagtgaggcgagattaggccattgcactccagcctcagcaacaagagtgaaactttgtctcaaaaaacaacaacaacaacaacaacaacaacaaaacttcctaggccagatgtggtggctcatatgtataatcttagcactttgggaggccaaggcaggaggattgcttgaggcgaggagttcaagaccagcctaggcaacatagggagacccccatctctacaaaaatttaaaaattagcctagcatggtggcacgctctgtaatcccaaatacgcggtaggctgaggctgaggagggtggattgcttgagcccaggggtttgaggctgcagtgagccacagtcacgccactgcattctatcctgggcaacagatggagaccttgtctcaaaaaaaaaaaaaaaaaa

SEQ ID NO: 1522 - protein, 160 aa, Homo sapien
MHLVVESFPSYRDVTLFEGKRVSFYKRAQILVADTWSVLEGKGDGCFKDISSITMFADYRLPQVLAHLGALKYSDDLLKKLLKGEMLSYGDRQEVEIRGCSLWCVELIRDCLLELIEQKGEKPNGEINSILLDYYLWDYAHDHREDMKGIPFHRIRCIYY

SEQ ID NO: 1523 - DNA, 2331 bp, Homo sapien
aaaaacaagctcagcgatggcggctccagaaggcagcggtctaggcgaggacgcccggctggaccaggagaccgcccagtggctgcgctgggacaagaattccttaactttggaggcagtgaaacgactaatagcagaaggtaataaagaagaactacgaaaatgttttggggcccgaatggagtttgggacagctggcctccgagctgctatgggacctggaatttctcgtatgaatgacttgaccatcatccagactacacagggattttgcagatacctggaaaaacaattcagtgacttaaagcagaaaggcatcgtgatcagttttgacgcccgagctcatccatccagtgggggtagcagcagaaggtttgcccgacttgctgcaaccacatttatcagtcaggggattcctgtgtacctcttttctgatataacgccaaccccctttgtgcccttcacagtatcacatttgaaactttgtgctggaatcatggtaactgcatctcacaatccaaagcaggataatggttataaggtctattgggataatggagctcagatcatttctcctcacgataaagggatttctcaagctattgaagaaaatctagaaccgtggcctcaagcttgggacgattctttaattgatagcagtccacttctccacaatccgagtgcttccatcaataatgactactttgaagaccttaaaaagtactgtttccacaggagcgtgaacagggagacaaaggtgaagtttgtgcacacctctgtccatggggtgggtcatagctttgtgcagtcagctttcaaggcttttgaccttgttcctcctgaggctgttcctgaacagaaagatccggatcctgagtttccaacagtgaaatacccgaatcccgaagaggggaaaggtgtcttgactttgtcttttgctttggctgacaaaaccaaggccagaattgttttagctaacgacccggatgctgatagacttgctgtggcagaaaagcaagacagtggtgaatggagggtgttttcaggcaatgagttgggggccctcctgggctggtggctttttacatcttggaaagagaagaaccaggatcgcagtgctctcaaagacacgtacatgttgtccagcaccgtctcctccaaaatcttgcgggccattgccttaaaggaaggttttcattttgaggaaacattaactggctttaagtggatgggaaacagagccaaacagctaatagaccaggggaaaactgttttatttgcatttgaagaagctattggatacatgtgctgcccttttgttctggacaaagatggagtcagtgccgctgtcataagtgcagagttggctagcttcctagcaaccaagaatttgtctttgtctcagcaactaaaggccatttatgtggagtatggctaccatattactaaagcttcctattttatctgccatgatcaagaaaccattaagaaattatttgaaaacctcagaaactacgatggaaaaaataattatccaaaagcttgtggcaaatttgaaatttctgccattagggaccttacaactggctatgatgatagccaacctgataaaaaagctgttcttcccactagtaaaagcagccaaatgatcaccttcacctttgctaatggaggcgtggccaccatgcgcaccagtgggacagagcccaaaatcaagtactatgcagagctgtgtgccccacctgggaacagtgatcctgagcagctgaagaaggaactgaatgaactggtcagtgctattgaagaacattttttccagccacagaagtacaatctgcagccaaaagcagactaaaatagtccagccttgggtatacttgcatttacctacaattaagctgggtttaacttgttaagcaatatttttaagggccaaatgattcaaaacatcacaggtatttatgtgttttacaaagacctacattcctcattgtttcatgtttgacctttaaggtgaaaaaagaaaatggccaaacccaacaaactaacattcctactaaaaagttgagcttggacatattttgaatttttgtaagtgaagatttttaaactgactaacttaaaaaaatagattgtaattgatgtgccttaatttgcataaatcataaatgtatgtcctctctgtaattgttttaatgtgtgcttgaaatatccagaaaacctatggagttagtaaattctgggctgtcatatgtaggatagccactttttaggtatatgtacatttatatttctatcaattccttagaaagtaaaataaatgaatagatc

SEQ ID NO: 1524 - protein, 612 aa, Homo sapien
MAAPEGSGLGEDARLDQETAQWLRWDKNSLTLEAVKRLIAEGNKEELRKCFGARMEFGTAGLRAAMGPGISRMNDLTIIQTTQGFCRYLEKQFSDLKQKGIVISFDARAHPSSGGSSRRFARLAATTFISQGIPVYLFSDITPTPFVPFTVSHLKLCAGIMVTASHNPKQDNGYKVYWDNGAQIISPHDKGISQAIEENLEPWPQAWDDSLIDSSPLLHNPSASINNDYFEDLKKYCFHRSVNRETKVKFVHTSVHGVGHSFVQSAFKAFDLVPPEAVPEQKDPDPEFPTVKYPNPEEGKGVLTLSFALADKTKARIVLANDPDADRLAVAEKQDSGEWRVFSGNELGALLGWWLFTSWKEKNQDRSALKDTYMLSSTVSSKILRAIALKEGFHFEETLTGFKWMGNRAKQLIDQGKTVLFAFEEAIGYMCCPFVLDKDGVSAAVISAELASFLATKNLSLSQQLKAIYVEYGYHITKASYFICHDQETIKKLFENLRNYDGKNNYPKACGKFEISAIRDLTTGYDDSQPDKKAVLPTSKSSQMITFTFANGGVATMRTSGTEPKIKYYAELCAPPGNSDPEQLKKELNELVSAIEEHFFQPQKYNLQPKAD

SEQ ID NO: 1525 - DNA, 2035 bp, Homo sapien
aggaagctgcatgcatgagacccacagactcttgcaagctggatgccctctgtggatgaaagatgtatcatggaatgaacccgagcaatggagatggatttctagagcagcagcagcagcagcagcaacctcagtccccccagagactcttggccgtgatcctgtggtttcagctggcgctgtgcttcggccctgcacagctcacgggcgggttcgatgaccttcaagtgtgtgctgaccccggcattcccgagaatggcttcaggacccccagcggaggggttttctttgaaggctctgtagcccgatttcactgccaagacggattcaagctgaagggcgctacaaagagactgtgtttgaagcattttaatggaaccctaggctggatcccaagtgataattccatctgtgtgcaagaagattgccgtatccctcaaatcgaagatgctgagattcataacaagacatatagacatggagagaagctaatcatcacttgtcatgaaggattcaagatccggtaccccgacctacacaatatggtttcattatgtcgcgatgatggaacgtggaataatctgcccatctgtcaaggctgcctgagacctctagccccccagcataccccggctcaggggacacggacacaggcccaggggagtcagaaacctgtgacagcgtctcaggctcttctgagctgctccaaagtctgtattcacctcccaggtgccaagagagcacccaccctgcttcggacaaccctgacataattgccagcacggcagaggaggtggcatccaccagcccaggcatcgacattgcagatgagattcctctaatggaagaagatccctaatatgggtcaagatccagatgactctcctgctccttcggggaaaggaccttgtatcttggagtgaggtcacagaaggatagagcctgggggcaaaatgtctaacttgtctacatggggaccacagttcacattatgcatctcaggctccacagtgaggctgacaaactgcaatggcagtgcttttaaatgagatttgaggattcaccaagacccatggggaaccggggcagcagggaagccctcgcgtggtcttggatgaggggtgttaaatgtgtatcgtgctgtggaacatgggacaattccacgcacatcccaccgaatcatcacgcatcccattgactggcaagtactccccgccccctctgaaagcatgtcacatcatgtaaatttgcttctaacatctgcttcaaactgtctctggactccaaatttggatgggtcagcctctgcagaaagtttgtgttgagatgctggaagaacagcagagcctcctgcaccctcagcaagggaccagctcccaaaggaaaggtccttgtgtgacatttggagaatcttccttcatccagacaactctactcgaagcaagacgaaagcaggatgtggcagttgcagtgagaaaggaaaggaaaggtgggcagactctgctttctggaaatttcttcacaaagtagagctcatgaactctgtgctgtcttctggtaacatatcatcagtgtttgtattcatggtgtggcacatggatccatggcattgggtaaatctggtggtttttacacatggtcagaatgtgttcaaatacatctcatgatggagacagtaaccaaggtaatgttttgtttcagcattttaaaaagactccacttaacatttatctcagaatcatgagcctctctctagttgacaattgtcattgttcccccagccccaaattgaaccatacatttattttccaaaacagaaattgtttctgtaaacatatccgaccttcaaaagaagtgtgaggttggatttttcccccttttatttgtcctaagattccaggaggctggcctcccagcccagatagctcagccacctcacctgcctatcattcctgcattcctactttgagggtctcatcatgcccactgggtgttgttcctaagaaactgattgattaaaaaatttcccaaagtg

SEQ ID NO: 1526 - protein, 236 aa, Homo sapien
MYHGMNPSNGDGFLEQQQQQQQPQSPQRLLAVILWFQLALCFGPAQLTGGFDDLQVCADPGIPENGFRTPSGGVFFEGSVARFHCQDGFKLKGATKRLCLKHFNGTLGWIPSDNSICVQEDCRIPQIEDAEIHNKTYRHGEKLIITCHEGFKIRYPDLHNMVSLCRDDGTWNNLPICQGCLRPLAPQHTPAQGTRTQAQGSQKPVTASQALLSCSKVCIHLPGAKRAPTLLRTTLT

SEQ ID NO: 1527 - DNA, 1138 bp, Homo sapien
ccctttaaagggtgactcgtcccacttgtgttctctctcctggtgcagagttgcaagcaagtttatcagagtatcgccatgaagttcgtcccctgcctcctgctggtgaccttgtcctgcctggggactttgggtcaggccccgaggcaaaagcaaggaagcactggggaggaattccatttccagactggagggagagattcctgcactatgcgtcccagcagcttggggcaaggtgctggagaagtctggcttcgcgtcgactgccgcaacacagaccagacctactggtgtgagtacagggggcagcccagcatgtgccaggcttttgctgctgaccccaaaccttactggaatcaagccctgcaggagctgaggcgccttcaccatgcgtgccagggggccccggtgcttaggccatccgtgtgcagggaggctggaccccaggcccatatgcagcaggtgacttccagcctcaagggcagcccagagcccaaccagcagcctgaggctgggacgccatctctgaggcccaaggccacagtgaaactcacagaagcaacacagctgggaaaggactcgatggaagagctgggaaaagccaaacccaccacccgacccacagccaaacctacccagcctggacccaggcccggagggaatgaggaagcaaagaagaaggcctgggaacattgttggaaacccttccaggccctgtgcgcctttctcatcagcttcttccgagggtgacaggtgaaagacccctacagatctgacctctccctgacagacaaccatctctttttatattatgccgctttcaatccaacgttctcacactggaagaagagagtttctaatcagatgcaacggcccaaattcttgatctgcagcttctctgaagtttggaaaagaaaccttcctttctggagtttgcagagttcagcaatatgatagggaacaggtgctgatgggcccaagagtgacaagcatacacaactacttattatctgtagaagttttgctttgttgatctgagccttctatgaaagtttaaatatgtaacgcattcatgaatttccagtgttcagtaaatagcagctatgtgtgtgcaaaataaaagaatgatttcagaaat

SEQ ID NO: 1528 - protein, 223 aa, Homo sapien
MKFVPCLLLVTLSCLGTLGQAPRQKQGSTGEEFHFQTGGRDSCTMRPSSLGQGAGEVWLRVDCRNTDQTYWCEYRGQPSMCQAFAADPKPYWNQALQELRRLHHACQGAPVLRPSVCREAGPQAHMQQVTSSLKGSPEPNQQPEAGTPSLRPKATVKLTEATQLGKDSMEELGKAKPTTRPTAKPTQPGPRPGGNEEAKKKAWEHCWKPFQALCAFLISFFRG

SEQ ID NO: 1529 - DNA, 1390 bp, Homo sapien
gggaaaaatgctcttttgggtgctaggcctcctaatcctctgtggttttctgtggactcgtaaaggaaaactaaagattgaagacatcactgataagtacatttttatcactggatgtgactcgggctttggaaacttggcagccagaacttttgataaaaagggatttcatgtaatcgctgcctgtctgactgaatcaggatcaacagctttaaaggcagaaacctcagagagacttcgtactgtgcttctggatgtgaccgacccagagaatgtcaagaggactgcccagtgggtgaagaaccaagttggggagaaaggtctctggggtctgatcaataatgctggtgttcccggcgtgctggctcccactgactggctgacactagaggactacagagaacctattgaagtgaacctgtttggactcatcagtgtgacactaaacatgcttcctcgacctcaagaggatcagcctggccagggtggcacaactcttccttccccgtgcacagcaggaaagctgccatcagttggagggggctatactccatccaaatatgcagtggaaggtttcaatgacagcttaagacgggacatgaaagcttttggtgtgcacgtctcatgcattgaaccaggattgttcaaaacaaacttggcagatccagtaaaggtaattgaaaaaaaactcgccatttgggagcagctgtctccagacatcaaacaacaatatggagaaggttacattgaaaaaagtctagacaaactgaaaggcaataaatcctatgtgaacatggacctctctccggtggtagagtgcatggaccacgctctaacaagtctcttccctaagactcattatgccgctggaaaagatgccaaaattttctggatacctctgtctcacatgccagcagctttgcaagactttttattgttgaaacagaaagcagagctggctaatcccaaggcagtgtgactcagctaaccacaaatgtctcctccaggctatgaaattggccgatttcaagaacacatctccttttcaaccccattccttatctgctccaacctggactcatttagatcgtgcttatttggattgcaaaagggagtcccaccatcgctggtggtatcccagggtccctgctcaagttttctttgaaaaggagggctggaatggtacatcacataggcaagtcctgccctgtatttaggctttgcctgcttggtgtgatgtaagggaaattgaaagacttgcccattcaaaatgatctttaccgtggcctgccccatgcttatggtccccagcatttacagtaacttgtgaatgttaagtatcatctcttatctaaatattaaaagataagtcaaacattaaaaaaaaaaa

SEQ ID NO: 1530 - protein, 323 aa, Homo sapien
MLFWVLGLLILCGFLWTRKGKLKIEDITDKYIFITGCDSGFGNLAARTFDKKGFHVIAACLTESGSTALKAETSERLRTVLLDVTDPENVKRTAQWVKNQVGEKGLWGLINNAGVPGVLAPTDWLTLEDYREPIEVNLFGLISVTLNMLPRPQEDQPGQGGTTLPSPCTAGKLPSVGGGYTPSKYAVEGFNDSLRRDMKAFGVHVSCIEPGLFKTNLADPVKVIEKKLAIWEQLSPDIKQQYGEGYIEKSLDKLKGNKSYVNMDLSPVVECMDHALTSLFPKTHYAAGKDAKIFWIPLSHMPAALQDFLLLKQKAELANPKAV

SEQ ID NO: 1531 - DNA, 2089 bp, Homo sapien
cccgacccgtgcgagggccaggtccgcgcctgccccgccaggcgaagcgaggcgacccgcgtgcggccatggcttcgctgctgggagcctacccttggcccgagggtctcgagtgcccggccctggacgccgagctgtcggatggacaatcgccgccggccgtcccccggcccccgggggacaagggctccgagagccgtatccggcggcccatgaacgccttcatggtttgggccaaggacgagaggaaacggctggcagtgcagaacccggacctgcacaacgccgagctcagcaagatgctgggaaagtcgtggaaggcgctgacgctgtcccagaagaggccgtacgtggacgaggcggagcggctgcgcctgcagcacatgcaggactaccccaactacaagtaccggccgcgcaggaagaagcaggccaagcggctgtgcaagcgcgtggacccgggcttccttctgagctccctctcccgggaccagaacgccctgccggagaagagaagcggcagccggggggcgctgggggagaaggaggacaggggtgagtactcccccggcactgccctgcccagcctccggggctgctaccacgaggggccggctggtggtggcggcggcggcaccccgagcagtgtggacacgtacccgtacgggctgcccacacctcctgaaatgtctcccctggacgtgctggagccggagcagaccttcttctcctccccctgccaggaggagcatggccatccccgccgcatcccccacctgccagggcacccgtactcaccggagtacgccccaagccctctccactgtagccaccccctgggctccctggcccttggccagtcccccggcgtctccatgatgtcccctgtacccggctgtcccccatctcctgcctattactccccggccacctaccacccactccactccaacctccaagcccacctgggccagctttccccgcctcctgagcaccctggcttcgacgccctggatcaactgagccaggtggaactcctgggggacatggatcgcaatgaattcgaccagtatttgaacactcctggccacccagactccgccacaggggccatggccctcagtgggcatgttccggtctcccaggtgacaccaacgggtcccacagagaccagcctcatctccgtcctggctgatgccacggccacgtactacaacagctacagtgtgtcatagagctggaggcgccccgtccggtcagccctcgcgccctctccttcttgtgccttgagtggcagaggagccgtccagccacaccagctttcctcccaccgctcagggcagggaggtctgaactgcggccccagagcctttggcctaagctggactctccttatccgagtgccgcctctatccccttccccacgttccagcccctgcagcccacattttaagtatattccttcaagtgagttttcctccagcccctgagagttgctgtctcccagtggaatgttcactgacgtcttttcttggtagccatcatcgaaactaatggggggacagacttgatagccaaggtcccttctggtccagttttctgatttagggttctctcaagattaataaaggaagatggggaaatttgactcattaatgagctcgctaacctacgatctggtgataattttgtgtgcacagcccaaggaccacgaggctttctgcactttctgcacccccttccaaagtgaccacaaaatttcaaagggactcatacaatttgagaaaaaacagtcaacctgatttgagaaattaaccagtatggctaactatatcacagaaaatgggattgagttaaaactattttattttaaatatacattttaaagcagttctttttttttgttaatttgtttattatacacacacttcaagagccaccgcgcccagcctacatttataattttcattctcttttacctataaaattcagtgtattagtttcattacataggagaaattatatttctaaacattttatgatgtttaaaaacaaaacaggctgttgtaaaaaaaaaaaaaaaaaaaaa

SEQ ID NO: 1532 - protein, 388 aa, Homo sapien [sequence omitted]

SEQ ID NO: 1533 - DNA, 2187 bp, Homo sapien
  Unsure 2016: Unknown base
cactccggagactcgcggttgctacggcaccatggctggagaggtacttctcagccctctagctccaactgagaacccagccagtcaggaagtcgctacttcgggaacaccaaccaatcagggcggctggctctcagtcccctcgctgtggtcgcggactgtgtctgttcccaggagtccttcggcggctgttgtgtcagtggcctgatcgcgatggggacaaaggcgcaagtcgagaggaaactgttgtgcctcttcatattggcgatcctgttgtgctccctggcattgggcagtgttacagtgcactcttctgaacctgaagtcagaattcctgagaataatcctgtgaagttgtcctgtgcctactcgggcttttcttctccccgtgtggagtggaagtttgaccaaggagacaccaccagactcgtttgctataataacaagatcacagcttcctatgaggaccgggtgaccttcttgccaactggtatcaccttcaagtccgtgacacgggaagacactgggacatacacttgtatggtctctgaggaaggcggcaacagctatggggaggtcaaggtcaagctcatcgtgcttgtgcctccatccaagcctacagttaacatcccctcctctgccaccattgggaaccgggcagtgctgacatgctcagaacaagatggttccccaccttctgaatacacctggttcaaagatgggatagtgatgcctacgaatcccaaaagcacccgtgccttcagcaactcttcctatgtcctgaatcccacaacaggagagctggtctttgatcccctgtcagcctctgatactggagaatacagctgtgaggcacggaatgggtatgggacacccatgacttcaaatgctgtgcgcatggaagctgtggagcggaatgtgggggtcatcgtggcagccgtccttgtaaccctgattctcctgggaatcttggtttttggcatctggtttgcctatagccgaggccactttgacagaacaaagaaagggacttcgagtaagaaggtgatttacagccagcctagtgcccgaagtgaaggagaattcaaacagacctcgtcattcctggtgtgagcctggtcggctcaccgcctatcatctgcatttgccttactcaggtgctaccggactctggcccctgatgtctgtagtttcacaggatgccttatttgtcttctacaccccacagggccccctacttcttcggatgtgtttttaataatgtcagctatgtgccccatcctccttcatgccctccctccctttcctaccactgctgagtggcctggaacttgtttaaagtgtttattccccatttctttgagggatcaggaaggaatcctgggtatgccattgacttcccttctaagtagacagcaaaaatggcgggggtcgcaggaatctgcactcaactgcccacctggctggcagggatctttgaataggtatcttgagcttggttctgggctctttccttgtgtactgacgaccagggccagctgttctagagcgggaattagaggctagagcggctgaaatggttgtttggtgatgacactggggtccttccatctctggggcccactctcttctgtcttcccatgggaagtgccactgggatccctctgccctgtcctcctgaatacaagctgactgacattgactgtgtctgtggaaaatgggagctcttgttgtggagagcatagtaaattttcagagaacttgaagccaaaaggatttaaaaccgctgctctaaagaaaagaaaactggaggctgggcgcatggcttcacgcctataatcccagaggctgaggcaggcgggatcacctgaggtcaggagttcaagatcagcctgaccaacatggagaaaccctactaaaaatacaaagttagccaggcatggtggtgcatgcctgtaatcccagctgcttcaggagcctggcaacaagagcaaaacttccagttcaaaaaaatgnagaaaagaaattttgggggggaacaagaaagctggagctggtggcttaggccatcacccttcccttggctggaactactggacagacccttttgagatgtgcctgtggtgctgtggagatgtgtgtagtggtcttagctctttgttgagcttgtgtgtgtgttgtgtagtc

SEQ ID NO: 1534 - protein, 299 aa, Homo sapien
  Unsure 2016: Unknown amino acid
MGTKAQVERKLLCLFILAILLCSLALGSVTVHSSEPEVRIPENNPVKLSCAYSGFSSPRVEWKFDQGDTTRLVCYNNKITASYEDRVTFLPTGITFKSVTREDTGTYTCMVSEEGGNSYGEVKVKLIVLVPPSKPTVNIPSSATIGNRAVLTCSEQDGSPPSEYTWFKDGIVMPTNPKSTRAFSNSSYVLNPTTGELVFDPLSASDTGEYSCEARNGYGTPMTSNAVRMEAVERNVGVIVAAVLVTLILLGILVFGIWFAYSRGHFDRTKKGTSSKKVIYSQPSARSEGEFKQTSSFLV

SEQ ID NO: 1535 - DNA, 3534 bp, Homo sapien
tcgaggtcgacatttataccgtctgagggtagcagctcgaaagtagaagaaagtgttgccagggacggcagtatctctttgtgtgaccctggcggcttatgggacgttggcttcagacctttgtgatacaccatgctgcgtgggacgatgacggcgtggagaggaatgaggcctgaggtcacactggcttgcctcctcctagccacagcaggctgctttgctgacttgaacgaggtccctcaggtcaccgtccagcctgcgtccaccgtccagaagcccggaggcactgtgatcttgggctgcgtggtggaacctccaaggatgaatgtaacctggcgcctgaatggaaaggagctgaatggctcggatgatgctctgggtgtcctcatcacccacgggaccctcgtcatcactgcccttaacaaccacactgtgggacggtaccagtgtgtggcccggatgcctgcgggggctgtggccagcgtgccagccactgtgacactagccaatctccaggacttcaagttagatgtgcagcacgtgattgaagtggatgagggaaacacagcagtcattgcctgccacctgcctgagagccaccccaaagcccaggtccggtacagcgtcaaacaagagtggctggaggcctccagaggtaactacctgatcatgccctcagggaacctccagattgtgaatgccagccaggaggacgagggcatgtacaagtgtgcagcctacaacccagtgacccaggaagtgaaaacctccggctccagcgacaggctacgtgtgcgccgctccaccgctgaggctgcccgcatcatctaccccccagaggcccaaaccatcatcgtcaccaaaggccagagtctcattctggagtgtgtggccagtggaatcccacccccacgggtcacctgggccaaggatgggtccagtgtcaccggctacaacaagacgcgcttcctgctgagcaacctcctcatcgacaccaccagcgaggaggactcaggcacctaccgctgcatggccgacaatggggttgggcagcccggggcagcggtcatcctctacaatgtccaggtgtttgaaccccctgaggtcaccatggagctatcccagctggtcatcccctggggccagagtgccaagcttacctgtgaggtgcgtgggaaccccccgccctccgtgctgtggctgaggaatgctgtgcccctcatctccagccagcgcctccggctctcccgcagggccctgcgcgtgctcagcatggggcctgaggacgaaggcgtctaccagtgcatggccgagaacgaggttgggagcgcccatgccgtagtccagctgcggacctccaggccaagcataaccccaaggctatggcaggatgctgagctggctactggcacacctcctgtatcaccctccaaactcggcaaccctgagcagatgctgagggggcaaccggcgctccccagacccccaacgtcagtggggcctgcttccccgcagtgtccaggagagaaggggcagggggctcccgccgaggctcccatcatcctcagctcgccccgcacctccaagacagactcatatgaactggtgtggcggcctcggcatgagggcagtggccgggcgccaatcctctactatgtggtgaaacaccgcaaggtcacaaattcctctgacgattggaccatctctggcattccagccaaccagcaccgcctgaccctcaccagacttgaccccgggagcttgtatgaagtggagatggcagcttacaactgtgcgggagagggccagacagccatggtcaccttccgaactggacggcggcccaaacccgagatcatggccagcaaagagcagcagatccagagagacgaccctggagccagtccccagagcagcagccagccagaccacggccgcctctcccccccagaagctcccgacaggcccaccatctccacggcctccgagacctcagtgtacgtgacctggattccccgtgggaatggtgggttcccaatccagtccttccgtgtggagtacaagaagctaaagaaagtgggagactggattctggccaccagcgccatccccccatcgcggctgtccgtggagatcacgggcctagagaaaggcacctcctacaagtttcgagtccgggctctgaacatgctgggggagagcgagcccagcgccccctctcggccctacgtggtgtcgggctacagcggtcgcgtgtacgagaggcccgtggcaggtccttatatcaccttcacggatgcggtcaatgagaccaccatcatgctcaagtggatgtacatcccagcaagtaacaacaacaccccaatccatggcttttatatctattatcgacccacagacagtgacaatgatagtgactacaagaaggatatggtggaaggggacaagtactggcactccatcagccacctgcagccagagacctcctacgacattaagatgcagtgcttcaatgaaggaggggagagcgagttcagcaacgtgatgatctgtgagaccaaagctcggaagtcttctggccagcctggtcgactgccacccccaactctggccccaccacagccgccccttcctgaaaccatagagcggccggtgggcactggggccatggtggctcgctccagcgacctgccctatctgattgtcggggtcgtcctgggctccatcgttctcatcatcgtcaccttcatccccttctgcttgtggagggcctggtctaagcaaaaacatacaacagacctgggttttcctcgaagtgcccttccaccctcctgcccgtatactatggtgccattgggaggactcccaggccaccaggccagtggacagccctacctcagtggcatcagtggacgggcctgtgctaatgggatccacatgaataggggctgcccctcggctgcagtgggctacccgggcatgaagccccagcagcactgcccaggcgagcttcagcagcagagtgacaccagcagcctgctgaggcagacccatcttggcaatggatatgacccccaaagtcaccagatcacgaggggtcccaagtctagcccggacgagggctctttcttatacacactgcccgacgactccactcaccagctgctgcagccccatcacgactgctgccaacgccaggagcagcctgctgctgtgggccagtcaggggtgaggagagcccccgacagtcctgtcctggaagcagtgtgggaccctccatttcactcagggcccccatgctgcttgggccttgtgccagttgaagaggtggacagtcctgactcctgccaagtgagtggaggagactggtgcccccagcaccccgtaggggcctacgtaggacaggaacctggaatgcagctctccccggggccactggtgcgtgtgtcttttgaaacaccacctctcacaatttaggcagaagctgatatcccagaaagactatatattgttttttttttaaaaaaaaagtcg

SEQ ID NO: 1536 - protein, 1114 aa, Homo sapien
MLRGTMTAWRGMRPEVTLACLLLATAGCFADLNEVPQVTVQPASTVQKPGGTVILGCVVEPPRMNVTWRLNGKELNGSDDALGVLITHGTLVITALNNHTVGRYQCVARMPAGAVASVPATVTLANLQDFKLDVQHVIEVDEGNTAVIACHLPESHPKAQVRYSVKQEWLEASRGNYLIMPSGNLQIVNASQEDEGMYKCAAYNPVTQEVKTSGSSDRLRVRRSTAEAARIIYPPEAQTIIVTKGQSLILECVASGIPPPRVTWAKDGSSVTGYNKTRFLLSNLLIDTTSEEDSGTYRCMADNGVGQPGAAVILYNVQVFEPPEVTMELSQLVIPWGQSAKLTCEVRGNPPPSVLWLRNAVPLISSQRLRLSRRALRVLSMGPEDEGVYQCMAENEVGSAHAVVQLRTSRPSITPRLWQDAELATGTPPVSPSKLGNPEQMLRGQPALPRPPTSVGPASPQCPGEKGQGAPAEAPIILSSPRTSKTDSYELVWRPRHEGSGRAPILYYVVKHRKVTNSSDDWTISGIPANQHRLTLTRLDPGSLYEVEMAAYNCAGEGQTAMVTFRTGRRPKPEIMASKEQQIQRDDPGASPQSSSQPDHGRLSPPEAPDRPTISTASETSVYVTWIPRGNGGFPIQSFRVEYKKLKKVGDWILATSAIPPSRLSVEITGLEKGTSYKFRVRALNMLGESEPSAPSRPYVVSGYSGRVYERPVAGPYITFTDAVNETTIMLKWMYIPASNNNTPIHGFYIYYRPTDSDNDSDYKKDMVEGDKYWHSISHLQPETSYDIKMQCFNEGGESEFSNVMICETKARKSSGQPGRLPPPTLAPPQPPLPETIERPVGTGAMVARSSDLPYLIVGVVLGSIVLIIVTFIPFCLWRAWSKQKHTTDLGFPRSALPPSCPYTMVPLGGLPGHQASGQPYLSGISGRACANGIHMNRGCPSAAVGYPGMKPQQHCPGELQQQSDTSSLLRQTHLGNGYDPQSHQITRGPKSSPDEGSFLYTLPDDSTHQLLQPHHDCCQRQEQPAAVGQSGVRRAPDSPVLEAVWDPPFHSGPPCCLGLVPVEEVDSPDSCQVSGGDWCPQHPVGAYVGQEPGMQLSPGPLVRVSFETPPLTI

SEQ ID NO: 1537 - DNA, 2040 bp, Homo sapien
gcccgcagctgcagagagtcccgctgcgtctccgccgcgtgcgccctcctcgaccagcagacccgcgctgcgctccgccgctgacatgtgtgccgctcagatgccgcccctggcgcacatcttccgagggacgttcgtccactccacctggacctgccccatggaggtgctgcgggatcacctcctcggcgtgagcgacagcggcaaaatagtgtttttagaagaagcatctcaacaggaaaaactggccaaagaatggtgcttcaagccgtgtgaaataagagaactgagccaccatgagttcttcatgcctgggctggttgatacacacatccatgcctctcagtattcctttgctggaagtagcatagacctgccactcttggagtggctgaccaagtacacatttcctgcagaacacagattccagaacatcgactttgcagaagaagtatataccagagttgtcaggagaacactaaagaatggaacaaccacagcttgttactttgcaacaattcacactgactcatctctgctccttgccgacattacagataaatttggacagcgggcatttgtgggcaaagtttgcatggatttgaatgacacttttccagaatacaaggagaccactgaggaatcgatcaaggaaactgagagatttgtgtcagaaatgctccaaaagaactattctagagtgaagcccatagtgacaccacgtttttccctctcctgctctgagactttgatgggtgaactgggcaacattgctaaaacccgtgatttgcacattcagagccatataagtgaaaatcgtgatgaagttgaagctgtgaaaaacttataccccagttataaaaactacacatctgtgtatgataaaaacaatcttttgacaaataagacagtgatggcacacggctgctacctctctgcagaagaactgaacgtattccatgaacgaggagcatccatcgcacactgtcccaattctaatttatcgctcagcagtggatttctaaatgtgctagaagtcctgaaacatgaagtcaagatagggctgggtacagacgtggctggtggctattcatattccatgcttgatgcaatcagaagagcagtgatggtttccaatatccttttaattaataaggtaaatgagaaaagcctcaccctcaaagaagtcttcagactagctactcttggaggaagccaagccctggggctggatggtgagattggaaactttgaagtgggcaaggaatttgatgccatcctgatcaaccccaaagcatccgactctcccattgacctgttttatggggacttttttggtgatatttctgaggctgttatccagaagttcctctatctaggagatgatcgaaatattgaagaggtttatgtgggcggaaagcaggtggttccgttttccagctcagtgtaagaccctcgggcgtctacaaagttctcctgggattagcgtggttgtgcatctcccttgtgcccaggaaagaaacaattcacttaccagcctcctcaccccatcctccaccatttccttaatgttccatggtattttcaacggaatacactttgaaagacctgagtgtgaaagactgagagttgaggagttactttgtggatcttgtccaaatttagtgaaatgtggaagtcaaccagaccaatgatggaattaaatgtaaattccaagagggctttcacagtccacagggttcaaatgacttgggtaacagaagttattcttagcttacctgttatgtgacagtgatttacctgtccatttccaacccaaaagcctgtcagaaagcattctttagagaaaaccacttaacatttgttgttaaactcctgatcgctactcttaagaatatacatgtatgtattcataggaacattttttctcaatatttgtatgattcgcttactgttattgtgctgagtgagctcctgtgtgcttcagacaaaaataaatgagactttgtgtttacgttaaaaaaaaaaaaaaaaaaaaaa

SEQ ID NO: 1538 - protein, 454 aa, Homo sapien
MCAAQMPPLAHIFRGTFVHSTWTCPMEVLRDHLLGVSDSGKIVFLEEASQQEKLAKEWCFKPCEIRELSHHEFFMPGLVDTHIHASQYSFAGSSIDLPLLEWLTKYTFPAEHRFQNIDFAEEVYTRVVRRTLKNGTTTACYFATIHTDSSLLLADITDKFGQRAFVGKVCMDLNDTFPEYKETTEESIKETERFVSEMLQKNYSRVKPIVTPRFSLSCSETLMGELGNIAKTRDLHIQSHISENRDEVEAVKNLYPSYKNYTSVYDKNNLLTNKTVMAHGCYLSAEELNVFHERGASIAHCPNSNLSLSSGFLNVLEVLKHEVKIGLGTDVAGGYSYSMLDAIRRAVMVSNILLINKVNEKSLTLKEVFRLATLGGSQALGLDGEIGNFEVGKEFDAILINPKASDSPIDLFYGDFFGDISEAVIQKFLYLGDDRNIEEVYVGGKQVVPFSSSV

SEQ ID NO: 1539 - DNA, 4768 bp, Homo sapien
atccttgccgcccgccccggcccagccgcgtcccggagccgtcgggcatggagccgtggaagcagtgcgcgcagtggctcatccattgcaaggtgctgcccaccaaccaccgggtgacctgggactcggctcaggtgttcgaccttgcgcagaccctccgcgatggagtcctgctctgccagctgcttaacaacctccgggcgcactccatcaacctgaaggagatcaacctgaggccgcagatgtcccagtttctctgtttgaagaacataaggacatttctcacggcctgttgtgagacgtttggaatgaggaaaagtgaacttttcgaggcatttgacttgtttgatgttcgtgactttggaaaggttatagaaacattatcacgactttctcgaacacctatagcattggccacaggaatcaggcccttcccaacagaagaaagcattaatgatgaagacatctacaaaggccttcctgatttaatagatgaaacccttgtggaagatgaagaagatctctatgactgtgtttatggggaagatgaaggtggagaagtctatgaggacttaatgaaggcagaggaagcacatcagcccaaatgtccagaaaatgatatacgaagttgttgtctagcagaaattaagcagacagaagaaaaatatacagaaactttggagtcaatagaaaagtatttcatggcaccactaaaaagatttctgacagcagcagaatttgattcagtattcatcaacattcctgaacttgtaaaacttcatcggaacctaatgcaagagattcatgattccattgtaaataaaaatgaccagaacttgtaccaagtttttattaactacaaggaaagattggttatttacgggcagtactgcagtggagtggagtcagccatctctagtttagactacatttctaagtcaaaagaagatgtcaaactgaaattagaggaatgttccaaaagagcaaataatgggaaatttactcttcgagacttgcttgtggttcctatgcaacgtgttttaaagtaccaccttctcctccaggaactggtcaaacataccactgatccgactgagaaggcaaatctgaaactggctcttgatgccatgaaggacttggcacaatatgtgaatgaagtgaaaagagataatgagacccttcgtgaaattaaacagtttcagctatctatagagaatttgaaccaaccagttttgctttttggacgacctcagggagatggtgaaattcgaataaccactctagacaagcataccaaacaagaaaggcatatcttcttatttgatttggcagtgatcgtatgtaagagaaaaggtgataactatgaaatgaaggaaataatagatcttcagcagtacaagatagccaataatcctacaaccgataaagaaaacaaaaagtggtcttatggcttctacctcatccatacccaaggacaaaatgggttagaattttattgcaaaacaaaagatttaaagaagaaatggctagaacagtttgaaatggctttgtctaacataagaccagactatgcagactccaatttccacgacttcaagatgcataccttcactcgagtcacatcctgcaaagtctgccagatgctcctgaggggaacattttatcaaggctatttatgttttaagtgtggagcgagagcacacaaagaatgtttgggaagagtagacaattgtggcagagttaattctggtgaacaagggacactcaaactaccagagaaacggaccaatggactgcgaagaactcctaaacaggtggatccaggtttaccaaagatgcaggtcattaggaactattctggaacaccacccccagctctgcatgaaggaccccctttacagctccaggccggggataccgttgaacttctgaaaggagatgcacacagtctgttttggcagggcagaaatttagcatctggagaggttggattttttccaagtgatgcagtcaagccttgcccatgtgtgcccaaaccagtagattattcttgccaaccctggtatgctggagcaatggaaagattgcaagcagagaccgaacttattaatagggtaaatagtacttaccttgtgaggcacaggaccaaagagtcaggagaatatgcaattagcattaagtacaataatgaagcaaagcacatcaagattttaacaagagatggcttttttcacattgcagaaaatagaaaatttaaaagtttaatggaacttgtggagtactacaagcatcattctctcaaggaagggttcagaaccttagatacaactctgcagtttccatacaaggagccagaacattcagctggacagaggggtaatagagcaggcaacagcttgttaagtccaaaagtgctgggcattgccatcgctcggtatgacttctgtgcaagagatatgagagagttgtccttgttgaaaggagatgtggtgaagatttacacaaagatgagtgcaaatggctggtggagaggagaagtaaatggcagggtgggctggtttccatccacatatgtggaagaggatgaataaattcaaatcccgtgttgcaccctgcaccaaaaatttcagagaagggataaatagaagcctgcacagcatcgtgaattaactgaagtgtttaaaaagctgcatttctggctgttcaacatcctccctccttagcccctcctaagtcttaatgctgagatttctaaagatgctggtactgacagattaatggcttgcctagagctgtgcaagaaacagcctgccagtctgtcattgtcagggaccagggcaaaaccaagagctgttcttcccagaagagccctgcaaacacattggttcgtgcttccctttacttcttctggtcagataccatgaatgccagtcatcagtaaatcttaatacacttttgctttattctcacatgccattcaccagattatttgatggtacaaagaagcagaagtgtaattttccttttcccagcatgacgaaaaattggagttctgccatttgagcagcttactggaaagatccagccttacttgtcttaaattgtccaacaaggtgactcattgcccggcaaacacttttaccctcagatgttactcatgatattataaaatatgaggccagtgctcaggtttgcatcataagtgagctatccctgaagggttttaattacttatttggtgtcctgattatatttgcaaacttctttataaaaggtgaaaaaagcacacaaaagagagggtgtcttcatattaaaccttcacaaccttcatgatttcataggattattttggaaatatagcacttgactttatgaaaggatctgggctaggtatattaggggtagttgccaataacctgaagaagctggcattgtttacagaaacagatcaagggctataatttatgtcattttatagcagcagtatctattaatacatgccttttcctcccatccacctcccccgcacacacacaaagatgacctgggacatgatttttttattcccacattttcttggagcacaaacaactttgttgaggattttggaaggaaagcacaactgggtcctttattcatttctgggacagaaagagggtcagtggacttttgtgggcctccagcttctctcagagtctccccctctgcagcccatcctgggagtgtattaactggagggaagatgggtcttgcagtacatttgttttgcccagccatcactcttttttgtgaggagcctaaatacattcttcctggggtccagagtccccattcaaggcagtcaagttaagacactaacttggccctttcctgatggaaatatttcctccatagcagaagttgtgttctgacaagactgagagagttacatgttgggaaaaaaaagaagcattaacttagtagaactgaaccaggagcattaagttctgaaattttgaatcatctctgaaatgaagcaggtgtagcctgccctctcatcaatccgtctgggtgccagaactcaaggttcagtggacacatccccctgttagagaccctcatgggctaggacttttcatctaggatagattcaagacctttacctcagaattatgtaaactgtgattgtgttttagaaaaattattatttgctaaaaccatttaagtctttgtatatgtgtaaatgatcacaaaaatgtattttataaaatgttctgtacaataaagttacacctcaaagtgtactcttggaatggattctttcctgtaaagtcttatctgcgactctgtctcgggaatgttttgtctgttgccgtcagccgaactttgttatggagggagcagcctcacacaagcagaaacactcctgtggatggtattgtagcatgtattgtttattttagtcaatagaccctctccttataaatggtgtttagtcttcctgttgcatttcatgggcctgggggtttcctagcagaggatattggagcccctttttgtgacattaccaattacatctttgtccacgtttaatactttgttttggaaaatttaaatgctgcagatttgtgtagagttctaataccaaagacagaagtaaatgttttccatatactttgtcttgcctgtatgcagcccttgtgtaatatggtgaattagagtggtatttcactttgtattattttgtaaatatgtcaatataataaatagtgactaaaaaaaaaaaaaa

SEQ ID NO: 1540 - protein, 847 aa, Homo sapien
MEPWKQCAQWLIHCKVLPTNHRVTWDSAQVFDLAQTLRDGVLLCQLLNNLRAHSINLKEINLRPQMSQFLCLKNIRTFLTACCETFGMRKSELFEAFDLFDVRDFGKVIETLSRLSRTPIALATGIRPFPTEESINDEDIYKGLPDLIDETLVEDEEDLYDCVYGEDEGGEVYEDLMKAEEAHQPKCPENDIRSCCLAEIKQTEEKYTETLESIEKYFMAPLKRFLTAAEFDSVFINIPELVKLHRNLMQEIHDSIVNKNDQNLYQVFINYKERLVIYGQYCSGVESAISSLDYISKSKEDVKLKLEECSKRANNGKFTLRDLLVVPMQRVLKYHLLLQELVKHTTDPTEKANLKLALDAMKDLAQYVNEVKRDNETLREIKQFQLSIENLNQPVLLFGRPQGDGEIRITTLDKHTKQERHIFLFDLAVIVCKRKGDNYEMKEIIDLQQYKIANNPTTDKENKKWSYGFYLIHTQGQNGLEFYCKTKDLKKKWLEQFEMALSNIRPDYADSNFHDFKMHTFTRVTSCKVCQMLLRGTFYQGYLCFKCGARAHKECLGRVDNCGRVNSGEQGTLKLPEKRTNGLRRTPKQVDPGLPKMQVIRNYSGTPPPALHEGPPLQLQAGDTVELLKGDAHSLFWQGRNLASGEVGFFPSDAVKPCPCVPKPVDYSCQPWYAGAMERLQAETELINRVNSTYLVRHRTKESGEYAISIKYNNEAKHIKILTRDGFFHIAENRKFKSLMELVEYYKHHSLKEGFRTLDTTLQFPYKEPEHSAGQRGNRAGNSLLSPKVLGIAIARYDFCARDMRELSLLKGDVVKIYTKMSANGWWRGEVNGRVGWFPSTYVEEDE

SEQ ID NO: 1541 - DNA, 2713 bp, Homo sapien
ctcagaccatagcctaaacctcatcgtccctatctggcccacctggagcatccacctagaggatgccactagaggagcctggatgcctgtagagtctggggggctagagtcttcccttttcaggcccaagaaagggaatcaggcagactgctgaacagtaagtatgactttgtaggcagcctttagacatagctattcaccaagctaccgtaagcttttcacagtttgcttttaacaggctcttgtaggctgcacatgcttccctagaaacttgtcttcccttctgcgatgtcacacccctaagctggtcctgaaaaattggacatctcgtcactctgtattcactgttcctcccaacaagagagttgtaccctgtttttagctaccctggggagaggctggctcaggagtctagaacagggctagattggggggcaacaaggggctaccatttccctccctttaggctcatggagagtctacatccagccttatcttctcccatgggaaaccaaaggaggctcaacatggtgagaagagagcatgacatccagagccaggcagcctacagcacctgggaccaccagggaatgggcacacagcaagggttggcctcccttcttgggcagtggaaaaagtcctagaaggagtccatgcttctcccaccaaacatgagtacctgctgcccttgcccttgtgctgaatgccaaggaccaaagaagatgcctccccacccagtgtgggaaattcacaggagtggcctgcagtgccatcctcatgtacatattctgcactgattgctggctcatcgctgtgctctacttcacttggctggtgtttgactggaacacacccaagaaaggtggcaggaggtcacagtgggtccgaaactgggctgtgtggcgctactttcgagactactttcccatccagctggtgaagacacacaacctgctgaccaccaggaactatatctttggataccacccccatggtatcatgggcctgggtgccttctgcaacttcagcacagaggccacagaagtgagcaagaagttcccaggcatacggccttacctggctacactggcaggcaacttccgaatgcctgtgttgagggagtacctgatgtctggaggtatctgccctgtcagccgggacaccatagactatttgctttcaaagaatgggagtggcaatgctatcatcatcgtggtcgggggtgcggctgagtctctgagctccatgcctggcaagaatgcagtcaccctgcggaaccgcaagggctttgtgaaactggccctgcgtcatggagctgacctggttcccatctactcctttggagagaatgaagtgtacaagcaggtgatcttcgaggagggctcctggggccgatgggtccagaagaagttccagaaatacattggtttcgccccatgcatcttccatggtcgaggcctcttctcctccgacacctgggggctggtgccctactccaagcccatcaccactgttgtgggagagcccatcaccatccccaagctggagcacccaacccagcaagacatcgacctgtaccacaccatgtacatggaggccctggtgaagctcttcgacaagcacaagaccaagttcggcctcccggagactgaggtcctggaggtgaactgagccagccttcggggccaactccctggaggaaccagctgcaaatcacttttttgctctgtaaatttggaagtgtcatgggtgtctgtgggttatttaaaagaaattataacaattttgctaaaccattacaatgttaggtcttttttaagaaggaaaaagtcagtatttcaagttctttcacttccagcttgccctgttctaggtggtggctaaatctgggcctaatctgggtggctcagctaacctctcttcttcccttcctgaagtgacaaaggaaactcagtcttcttggggaagaaggattgccattagtgacttggaccagttagatgattcactttttgcccctagggatgagaggcgaaagccacttctcatacaagcccctttattgccactaccccacgctcgtctagtcctgaaactgcaggaccagtttctctgccaaggggaggagttggagagcacagttgccccgttgtgtgagggcagtagtaggcatctggaatgctccagtttgatctcccttctgccacccctacctcacccctagtcactcatatcggagcctggactggcctccaggatgaggatgggggtggcaatgacaccctgcaggggaaaggactgccccccatgcaccattgcagggaggatgccgccaccatgagctaggtggagtaactggtttttcttgggtggctgatgacatggatgcagcacagactcagccttggcctggagcacatgcttactggtggcctcagtttaccttccccagatcctagattctggatgtgaggaagagatccctcttcagaaggggcctggccttctgagcagcagattagttccaaagcaggtggcccccgaacccaagcctcacttttctgtgccttcctgagggggttgggccggggaggaaacccaaccctctcctgtgtgttctgttatctcttgatgagatcattgcaccatgtcagacttttgtatatgccttgaaaataaatgaaagtgagaatccaaaaaaaaaaaaaaaaaa

SEQ ID NO: 1542 - protein, 297 aa, Homo sapien
MYIFCTDCWLIAVLYFTWLVFDWNTPKKGGRRSQWVRNWAVWRYFRDYFPIQLVKTHNLLTTRNYIFGYHPHGIMGLGAFCNFSTEATEVSKKFPGIRPYLATLAGNFRMPVLREYLMSGGICPVSRDTIDYLLSKNGSGNAIIIVVGGAAESLSSMPGKNAVTLRNRKGFVKLALRHGADLVPIYSFGENEVYKQVIFEEGSWGRWVQKKFQKYIGFAPCIFHGRGLFSSDTWGLVPYSKPITTVVGEPITIPKLEHPTQQDIDLYHTMYMEALVKLFDKHKTKFGLPETEVLEVN

SEQ ID NO: 1543 - DNA, 617 bp, Homo sapien
ctcaggaacagccttctcctgcctcctctgcacctggacaactcaactcctgccaagatgtcctgccagcagaaccagcagcagtgccaacccccacccaagtgtccctcacccaagtgtcccccaaagagcccagtacagtgtctgcctccagcttcctctggctgtgccccaagctctgggggctgtggccctagctccgagggcggctgcttcctgaaccaccacaggcgccaccaccgatgccggcgccagaggcccaactcctgtgacaggggcagtggtcagcaaggcgggggctctggctgcggccatggctctggaggctgctgctgacctggatcctgatgctgagacaagcgattttggaggaaacaagaatcccaagggcccaggaaaaccccatcttgatgcatgagttcccagataccctcttctggctttcacaggctgagctaggggttttcctgtggaaggtctgagctctccccagaaggcacttcctgtctgatgtccaggatgtcacatgttcccttacccctgtacctgtgaaggattggcagtgcttgtgcctgacctcatcaaaaaataaagctccttgtcctcattaaaaaaaa

SEQ ID NO: 1544 - protein, 92 aa, Homo sapien
MSCQQNQQQCQPPPKCPSPKCPPKSPVQCLPPASSGCAPSSGGCGPSSEGGCFLNHHRRHHRCRRQRPNSCDRGSGQQGGGSGCGHGSGGCC

SEQ ID NO: 1545 - DNA, 737 bp, Homo sapien
ttcttttccctgggtcctgggagctgaggcaggaggagaagtggggggatgggagtggagagggagggcgggaaatcccagtgtggggagagggtcgatcagaccggcttggctccctgggcacctctgtcagagccccgcccagggctgcgtggccgcccatataagtggctctgggctgagacggagaagtcagtgcccgtgtctccacacgtctgcctccatcactgccatcgcgatcctgcagctatgtcctaccctgtgaccagtcagccccagtgcgccaccaccagctgctaccagacccagctcagtgactggcacacaggtctcacggactgctgcaacgacatgcctgtctgtctgtgcggcacttttgctcctctgtgccttgcctgccgcatctccgacgactttggcgagtgctgctgcgcgccctacctgcccggaggcctgcactccatccgcaccggcatgcgggagcgctaccacatccagggctccgtcgggcacgactgggcggccctcaccttttgtctgccctgcgccctctgccagatggcgcgggaactgaagatccgagagtaaggaagttccctgtcttccccgtccttttccaccagtctcgcctctggccttctctggccactcctgggagggactgcctcaccacccctgtcccgctgccagaaatacacccacaataaaaacctgaaaaccaaaaaaaaaaaaaaaaa

SEQ ID NO: 1546 - protein, 179 aa, Homo sapien
MGVEREGGKSQCGERVDQTGLAPWAPLSEPRPGLRGRPYKWLWAETEKSVPVSPHVCLHHCHRDPAAMSYPVTSQPQCATTSCYQTQLSDWHTGLTDCCNDMPVCLCGTFAPLCLACRISDDFGECCCAPYLPGGLHSIRTGMRERYHIQGSVGHDWAALTFCLPCALCQMARELKIRE

SEQ ID NO: 1547 - DNA, 2821 bp, Homo sapien
cccacgcgtccggagaggcgcacccgggcggccagctgggctcggagcggaacggggtcaggatggacgaggacgtgctaaccaccctgaagatcctcatcatcggcgagagtggggtgggcaagtccagcctgctcttgaggttcacagatgatacgtttgatccagaacttgcagcaacaataggtgttgactttaaggtgaaaacaatttcagtggatggaaataaggctaaacttgcaatatgggatactgctggtcaagagaggtttagaacattaactcccagctattatagaggtgcacagggtgttatattagtttatgatgtcacaagaagagatacatttgttaaactggataattggttaaatgaattggaaacatactgtacaagaaatgacatagtaaacatgctagttggaaataaaatcgataaggaaaatcgtgaagtcgatagaaatgaaggcctgaaatttgcacgaaagcattccatgttatttatagaggcaagtgcaaaaacctgtgatggtgtacaatgtgcctttgaagaacttgttgaaaagatcattcagacccctggactgtgggaaagtgagaaccagaataaaggagtcaaactgtcacacagggaagaaggccaaggaggaggagcctgtggtggttattgctctgtgttataaactctgggaaattccatctcttgcatatttgatcagatagtgacatctttctgtatataaactctttaactgctattttagggaccttgcagtttgcacataattgttttatatcatagcagtaaatatttgcaagaaatcccactcatcgaccccgggtaaaatgttatggtaagcatgcacagtttgcagtctacagtttttttatgtagcacaaaataggtgtacctttataagtacattcaattttatgatttacatttatcatgtaatttttaaaaaaatccatctatctaggatatgttgatacaaagtctgcttttgctattctttttgcttaaatactcctatcattttctgaattacttggtatttagaactcctagcaccacggggaagaatagaggtatcatcaaacgtggcaaattttctttcaggaataataaagagcatgattccacagcttttctgggatgtttgagattcttttttagtactaagcaaaattctcatcacagaatgtagcccaggccaatttataactaaatctctatttgttcggatgatgcttctaaaacagcattgataggttaaagaagcttggtatttttaatttacttcaatgattagctcagttgcttaactggagttttaatcctgtgatatgtacattggattcatgactgtgcagcatttttagttatgtggtgtttggcagaatgacaataaggttttcccccattttggtttcaggaggacatgaatagtgtgtttattgtaactcctcatacacttttaaaaccaacatcttttttcataaatgttggtagtgtttgtccaggtaccttaactgtagcttgtgtaatgttgatgaatatctgtatcttacggcttccataatggctagttgatattcaaaaacctatttctgtgttttgaggggtggggaaaaaaaacactaagtgataatttgaaaaaggcatattgcttccagattctgatgtgtgagggaaaatactgtcacaatgaaaatcttgacaatttacttaacaagtaaccagtagttcatcaaaaccaacttgtacagactaataaatctttttcacagtattcagttttctcacctcttgctattgtatattgtagatttttttcattcatgtgttatttaatttacactgatctctgctattttaaccccccaaataagttatttgtcctttaaggttggttactataatacccctcagtaagattccagtattaatttctgggcagtttgttctctgtatacaattgcaaatgataagcatttttgtgagtgaccacctttgcaatatgtttgttaatttacttcatgttgggttctttctgaaatgtacatctttacatataaaaacctcacattctacttgatttacacttcctagtctacattacatgtggttgaaggttttatacattctatatgcttttactaaatatacaagatttactactagaaatttggagaaagaacactaacacatgtacttgtgatttgttcatgttatattaaaacttgagatttgtgtatttatgtagagtctgtattgacaagactgttgttttttgctccttgagctatataataatctgtgtattggattgttgtcttgatttggtctaaatttgaatatatatgagttacttgaatataacaaaaatgaattttgtttgatagatttatattgtaacctttttctagttcttgaataaatatagcctgctttccctagatgcatttgtgtaggaagtatatacatttccctattactctcatcagctgaagaatatgtactattgtgttactcaaattatgtggctttcattttgttgttttgttgcaagcttagtgttttgtagtggaggttttgtaaatgaaacagttgtaatatctaaggtcaggcacctagtaacagggttttgttaattcttttcagaatcattgaagcagtcttaaagggtcttttgcagatggtacaaattagaacaattagaatatagtattttgagttctagtagtactgagattgacccaaacaaataaaaaactattcaatttctgagtaatagttaaaaaaaaaaaaaaaaaaaaa

SEQ ID NO: 1548 - protein, 206 aa, Homo sapien
MDEDVLTTLKILIIGESGVGKSSLLLRFTDDTFDPELAATIGVDFKVKTISVDGNKAKLAIWDTAGQERFRTLTPSYYRGAQGVILVYDVTRRDTFVKLDNWLNELETYCTRNDIVNMLVGNKIDKENREVDRNEGLKFARKHSMLFIEASAKTCDGVQCAFEELVEKIIQTPGLWESENQNKGVKLSHREEGQGGGACGGYCSVL

SEQ ID NO: 1549 - DNA, 4244 bp, Homo sapien
ccacgcgtccgccggatcagagagtgctccgagctgggttgccccactgtgcttgtatctgcactctccaacactaggcatcattgacatgttaaagcttagccaaatagaattgttctttgtcattctttttttaacttttacttattcattaggatgatttcataatatatttcctggtttagaggaaacaggaacaatggctaccgagagtactccctcagagatcatagaaagagaaagaaaaaagttgcttgaaatccttcaacatgatcctgattctatcttagacacgttaacttctcggaggctgatttctgaggaagagtatgagactctggagaatgttacagatctcctgaagaaaagtcggaagctgttaattttggtacagaaaaagggagaggcgacctgtcagcattttctcaagtgtttatttagtacttttccacagtcagctgccatttgcggcttaaggcatgaagttttaaaacatgagaatacagtacctcctcaatctatgggggcaagcagtaattcagaagatgctttttctcctggaataaaacagcctgaagcccctgagatcacagtgttcttcagtgagaaggaacacttggatttggaaacctctgagtttttcagggacaagaaaactagttatagggaaacagctttgtctgccaggaagaatgagaaggaatatgacacaccagaagtcacattatcatattcagttgagaaagttggatgtgaagttccagcaactattacatatataaaagatggacagagatatgaggagctagatgattctttatacttaggaaaagaggaatatctaggatctgttgacacccctgaagatgcagaagccactgtggaagaggaggtttatgatgacccagagcacgttggatatgatggtgaagaggacttcgagaattcagaaaccacagagttctctggtgaagaaccaagttatgagggatcagaaaccagcctttcattggaggaggaacaggagaaaagtatagaagaaagaaaaaaggtgtttaaagatgtcctgttatgtttgaacatggatagaagcagaaaggttctgccagattttgttaaacaattctccttagatcgaggatgtaagtggacccctgagagtccaggagacttagcctggaatttcctgatgaaagttcaagcacgagatgtgacggctagggattcaatcctcagtcacaaggttctggatgaagatagcaaggaggatttgctggctggagtggagaatttggaaattcgagacatacaaaccattaatccccttgacgtgctttgtgccaccatgctgtgttcagatagctctttgcaacgccaagtcatgtcaaacatgtatcagtgccagtttgctcttcccctgctactgccagatgcagaaaacaacaaaagcatcttaatgctgggggccatgaaagacattgtgaagaagcagtcaacacagttttcaggggggcctacagaggatacagaaaagtttctgactctcatgaagatgcctgtcatctcttttgtgcgtctaggatactgtagcttctctaagtccagaatcctcaacacacttctcagccctgcccagttgaaattacacaaaatctttcttcatcaagatttgcctcttttggtgcttccccggcaaatctctgatggcctggttgagataacatggtgttttcctgatagcgatgatagaaaggaaaacccctttttccaaaagcctgttgctctggctaatctccgtggaaatctagaaagtttttggactcagtttggttttttgatggaagtttcttcagctgtgttttttttcactgactgtttaggtgagaaggaatgggacttgctaatgtttttaggagaggctgccattgaaagatgctactttgttctcagttcccaagccagggagagtgaagaggctcaaatttttcagaggatactgaacttgaagccagcacagctactgttttgggagaggggagatgctggggatagaaggaagaacatggagggccttcaagctgccctccaggaagtgatgttctcttcttgcctcagatgtgtgtctgtggaggatatggccgccctggccagggagctggggattcaggtagatgaagactttgaaaacactcagagaattcaagtttcctctggagaaaacatggctgggacagctgaaggtgagggtcagcaaagacacagtcagctaaaaagctcatctaaaagccaggctctaatgccaattcaagagcctgggactcaatgtgagctcagccagaatcttcagaatctctatggtaccccagtattcaggcctgttctagagaactcctggctctttccaaccagaattggaggtaactttaaccatgtttccttgaaagcctcctgggttatgggccgcccctttgggtcagagcagaggcctaagtggttccatcctttgccttttcagaatgcaggggcccagggccgaggtaaaagttttggtattcaatccttccatccccagatattttattcaggtgaaagattcatgaaattttccagagttgctcggggatgtcactcgaatggaacatttgggagactgccaagacccatttgtcagcatgtacaggcctgccctgagagaccacaaatgatgggaactcttgaaaggtctagggcagtagcctccaagataggtcactcctattccctggattcacagccagcaagagcagtagggaagccatggcctcagcaagcttgcaccagggtaacagagttaactgaagcaactggaaaactgataagaacatcccatattggaaagcctcaccctcagtcctttcaaccagcagcagccacacaaaaactaagacctgcttctcagcaaggagtccagatgaagacacaaggtggggcttcaaatccagctctccaaatagggtcccatcccatgtgcaagagctctcagttcaaatccgatcagtccaacccatccacagtcaaacactcccagcctaaacccttccattctgtgccctctcaacctaaatcctctcagacaaaatcctgtcagtcccagccctcccaaactaaaccttctccatgcaaatctactcagcctaagccaagccagccctggcctccccagtctaagccttctcagcccagaccccctcaacctaagtcatcctcaaccaatccttcacaagctaaggcacaccactcaaaagcagggcagaagaggggagggaagcattaaagagctaactccagagatctataaagcatatcctttacccaggccattcctatcatatagtaagcagaagagttgccatgaaagtaaaagactactgtcattagcatgtaaaacaaagaaagatatacatgaccgaattggatatctttgtttgtttgtttgagacagagtttcactcttgttgcccaggctggagtgcaatggcacgatctcggctcaccgcaacctctgcttcctggcttaaagtgattctcctgcctcagcctctcgagtagctgggattacaggcatgcaccaccacacccagctaattttgtatttttagtagaggcagggtttctccatgttggtcaggctggtcttgaactcccgacctcaggtgatccgcccacctaggcctctcaaagtgttgggattacgtgtgtaagccacagtgcccagcccgaattggatatctttaagatatctgtaagtgttatatccctaaccaagaagaaaaatatgaaaataattaagactagaatcaagcagtagataattgaatccaatcttgggtattattagataatgtataacttgcacccagggaatgggggtctatgagacaaccccacttggagaagaatggggttagggtctctaattgcaaagtgactgtacaataggacgaaagttgcctctgtgtctgagaaagtatcttagttgttggctgctccagaggtatctttgtcaaaagcttctggttcaatatcagccactgagcagataaccctgcttatttggtgtggttaaatcaactagcttctgctaatagccccaatttgcttgaatgggaaaactctctcatttgacccttataggtagaaataatgaattaacaaccaataaaattaatcatttggcattaaaaaaaaaaaaaaaaaaaaaaaaa

SEQ ID NO: 1550 - protein, 1037 aa, Homo sapien
MATESTPSEIIERERKKLLEILQHDPDSILDTLTSRRLISEEEYETLENVTDLLKKSRKLLILVQKKGEATCQHFLKCLFSTFPQSAAICGLRHEVLKHENTVPPQSMGASSNSEDAFSPGIKQPEAPEITVFFSEKEHLDLETSEFFRDKKTSYRETALSARKNEKEYDTPEVTLSYSVEKVGCEVPATITYIKDGQRYEELDDSLYLGKEEYLGSVDTPEDAEATVEEEVYDDPEHVGYDGEEDFENSETTEFSGEEPSYEGSETSLSLEEEQEKSIEERKKVFKDVLLCLNMDRSRKVLPDFVKQFSLDRGCKWTPESPGDLAWNFLMKVQARDVTARDSILSHKVLDEDSKEDLLAGVENLEIRDIQTINPLDVLCATMLCSDSSLQRQVMSNMYQCQFALPLLLPDAENNKSILMLGAMKDIVKKQSTQFSGGPTEDTEKFLTLMKMPVISFVRLGYCSFSKSRILNTLLSPAQLKLHKIFLHQDLPLLVLPRQISDGLVEITWCFPDSDDRKENPFFQKPVALANLRGNLESFWTQFGFLMEVSSAVFFFTDCLGEKEWDLLMFLGEAAIERCYFVLSSQARESEEAQIFQRILNLKPAQLLFWERGDAGDRRKNMEGLQAALQEVMFSSCLRCVSVEDMAALARELGIQVDEDFENTQRIQVSSGENMAGTAEGEGQQRHSQLKSSSKSQALMPIQEPGTQCELSQNLQNLYGTPVFRPVLENSWLFPTRIGGNFNHVSLKASWVMGRPFGSEQRPKWFHPLPFQNAGAQGRGKSFGIQSFHPQIFYSGERFMKFSRVARGCHSNGTFGRLPRPICQHVQACPERPQMMGTLERSRAVASKIGHSYSLDSQPARAVGKPWPQQACTRVTELTEATGKLIRTSHIGKPHPQSFQPAAATQKLRPASQQGVQMKTQGGASNPALQIGSHPMCKSSQFKSDQSNPSTVKHSQPKPFHSVPSQPKSSQTKSCQSQPSQTKPSPCKSTQPKPSQPWPPQSKPSQPRPPQPKSSSTNPSQAKAHHSKAGQKRGGKH

SEQ ID NO: 1551 - DNA, 728 bp, Homo sapien
cctcgccccgcctacgcgggaacccaaccgcggcgaccggacgtgcactcctccagtagcggctgcacgtcgtgcaatggcccgctatgaggaggtgagcgtgtccggcttcgaggagttccaccgggccgtggaacagcacaatggcaagaccattttcgcctactttacgggttctaaggacgccggggggaaaagctggtgccccgactgcgtgcaggctgaaccagtcgtacgagaggggctgaagcacattagtgaaggatgtgtgttcatctactgccaagtaggagaaaagccttattggaaagatccaaataatgacttcagaaaaaacttgaaagtaacagcagtgcctacactacttaagtatggaacacctcaaaaactggtagaatctgagtgtcttcaggccaacctggtggaaatgttgttctctgaagattaagattttaggatggcaatcatgtcttgatgtcctgatttgttctagtatcaataaactgtatacttgctttgaattcatgttagcaataaatgatgttaaaaaaactggcatgtgtctaaacaatagagtgctattaaaatgcccatgaacctttagtttgcctgtaatacatggatatttttaagatataaagaagtcttcagaaatagcagtaaaggctcaaaggaacgtgattcttgaaggtgacggtaatacctaaaaactcctaaaggtgcagagc

SEQ ID NO: 1552 - protein, 123 aa, Homo sapien
MARYEEVSVSGFEEFHRAVEQHNGKTIFAYFTGSKDAGGKSWCPDCVQAEPVVREGLKHISEGCVFIYCQVGEKPYWKDPNNDFRKNLKVTAVPTLLKYGTPQKLVESECLQANLVEMLFSED

SEQ ID NO: 1553 - DNA, 3059 bp, Homo sapien
gttcggtggtgtcccggtgcagccacgcgagagtagaagggtggaaaggggaggtgcccagtgaaatggagcctgtcccgtgcactttcgggcatttcgagcatcttgtgggctctcccaagtcgcggcccctcctctgagagccacagtcaggtctgtcctcaggggtcgaggcggctgcgctggggcctcggcccgggaggaggcggggggcacggcctttccattttccctgctcccctctgcagaagcctcatagggcccggcgcggcggctcacgcctgtcattcccagcgctttgggcggattgggtaggaggattacttgaggccaggagttcaagaccaggcagggcaacatagggagaccccccccccaaccatctctaatggaaaaaaaaaaaaaagtctccacatccagcgttgtgccttttctctataaggaacagcatctctgccttcctgttcacggtgaccttcgcttggtgtcctcctggcctcagcaacctgacaattctgtcgtgtcccgagagatggctaatgaatggcgcttgatgacagatgagtaatgcctgttgctgaaagattgacgatcatctttctcaagatgttttctgtcttcatgagtcaaaatttgaagaggaaaggatggtggctgggtggttgacaaattactctcaggactcagtgacctttgaggatgtggctgtggacttcacccaggaggagtggactttgctggatcaaactcagagaaacttatacagagatgtgatgctggagaactataagaatctagttgcagtagattgggagagtcatattaataccaaatggtcagcacctcagcagaattttttgcaggggaaaacatccagtgtggtggaaatggagagaaaccattttggagaggaactgtttgactttaaccaatgtgaaaaagccttgagtgaacactcatgccttaagactcacaggagaacttactttagaaagaaaacctgtgagtgtaatcaatgtgaaaaagccttcagaaaaccctctatctttactttacacaagaaaactgatatcggagaggaacttcctaactgtaatcaatgtgaaacagccttcagccaacatctacatcttgtttgcaagaaaactagccaaaatctacatcttgtttgcaagaaaactcacactcaagagaaaccatataaatgcagtgactgtgaaaaaggcttaccttcctcctcacacctcagagaatgtgtaagaatttatggtggagagagaccatatactcataaggagtatgtcgaaaccttttctcattctacagccctttttgtacacatgcaaactcaagatggagaaaaattctatgaatgtaaagcatgtgggaaacccttcactgagtcgtcatatcttactcaacatttaagaactcatagtagagtgttacctatagaacataagaaatttggcaaagcctttgctttttccccagatcttgctaaacatataagacttagaactagaggaaaacactatgtttgtaatgaatgtggcaaagaatttacttgtttctcaaaactcaacattcacataagggttcacactggagaaaaaccgtatgagtgcaacaaatgtgggaaagccttcactgattcatcaggtcttataaaacacaggcgaactcacactggagaaaagccttatgaatgtaaggaatgtgggaaagcttttgctaactcttcacatcttactgtacatatgagaactcacactggtgagaagccttatcaatgtaaggaatgtggaaaagcctttattaattcctcttcctttaaaagtcacatgcagactcatcctggtgtaaaaccctatgactgtcaacagtgtgggaaagccttcattcgatcctcatttcttattcgacatttgagaagtcacagtgcagaaaggccttttgaatgtgaggaatgtgggaaagcctttagatactcctcgcaccttagtcaacataaaagaatacatacaggggagaggccatataaatgtcaaaagtgtgggcaagccttcagtatctcatcaggccttacagtacacatgagaactcacactggtgaacggccctttgaatgtcaggaatgtgggaaagcctttactcggtccacatatcttattcgacatctaagaagtcatagtgtggagaaaccatataaggaatgtgggcaaacctttagtaattcctcatgccttactgaatgtgtgtgaattggggctgatacttggaaagaatgtggtaaagccactacttcctcacacttactgaacatgtactcattcatagtggcaatgtacacagtcataaggaatgtgggaagccttccttggtgtctcagatcttaacaattccaatagaagagaagacatatgaatgtaaggaatgtgggaaaatcttggctccttccataggccttactattcatgtgtctgtgcatcctaggaaacaaactgaacgtaggaaacctgtcgatgcttacatcttactgagtctgtttgaactcatgctggagagaaatgctatgaatgtgaggaaggtggaaaagctttcattattttcctcgggccttactgagcttgtgagcacattggatataaatgcacgtcctctggctgtaaggaatgtgttgaaacctttcactctgccttataccttaatattcagctgtgatctcacaagtgtgaaaaatcttatgaatgtaaaatgtgtggagattcttctttgtttttagcttccactttgggaacatgtcaaagcacacattgagaagtcccatgagtgaaagagatgttggaaagcccttgaacttggtcgttaggaaacatccacactgaagaggaacctgactgtatggaaggtcaaaaaggctgtattaatttacatgcaaaaagtcacactagaggaatgccatatcagaatgcttttggtaaatatacatgttttaaagaggttatatatcattaataaaaatatctagctggtctgaaaaaaaaaaaaaaaaaaaa

SEQ ID NO: 1554 - protein, 538 aa, Homo sapien
MVAGWLTNYSQDSVTFEDVAVDFTQEEWTLLDQTQRNLYRDVMLENYKNLVAVDWESHINTKWSAPQQNFLQGKTSSVVEMERNHFGEELFDFNQCEKALSEHSCLKTHRRTYFRKKTCECNQCEKAFRKPSIFTLHKKTDIGEELPNCNQCETAFSQHLHLVCKKTSQNLHLVCKKTHTQEKPYKCSDCEKGLPSSSHLRECVRIYGGERPYTHKEYVETFSHSTALFVHMQTQDGEKFYECKACGKPFTESSYLTQHLRTHSRVLPIEHKKFGKAFAFSPDLAKHIRLRTRGKHYVCNECGKEFTCFSKLNIHIRVHTGEKPYECNKCGKAFTDSSGLIKHRRTHTGEKPYECKECGKAFANSSHLTVHMRTHTGEKPYQCKECGKAFINSSSFKSHMQTHPGVKPYDCQQCGKAFIRSSFLIRHLRSHSAERPFECEECGKAFRYSSHLSQHKRIHTGERPYKCQKCGQAFSISSGLTVHMRTHTGERPFECQECGKAFTRSTYLIRHLRSHSVEKPYKECGQTFSNSSCLTECV

SEQ ID NO: 1555 - DNA, 2719 bp, Homo sapien
gcactgacggcccatggcgccgcccgccgcccgcctcgccctgctctccgccgcggcgctcacgctggcggcccgacccgcgcctagccccggcctcggccccggacccgagtgtttcacagccaatggtgcggattataggggaacacagaactggacagcactacaaggcgggaagccatgtctgttttggaacgagactttccagcatccatacaacactctgaaataccccaacggggaggggggcctgggtgagcacaactattgcagaaatccagatggagacgtgagcccctggtgctatgtggcagagcacgaggatggtgtctactggaagtactgtgagatacctgcttgccagatgcctggaaaccttggctgctacaaggatcatggaaacccacctcctctaactggcaccagtaaaacttccaacaaactcaccatacaaacttgcatcagtttttgtcggagtcagaggttcaagtttgctgggatggagtcaggctatgcttgcttctgtggaaacaatcctgattactggaagtacggggaggcagccagtaccgaatgcaacagcgtctgcttcggggatcacacccaaccctgtggtggcgatggcagggtcatcctctttgatactctcgtgggcgcctgcggtgggaactactcagccatgtcttctgtggtctattcccctgacttccccgacacctatgccacggggagggtctgctactggaccatccgggttccgggggcctcccacatccacttcagcttccccctatttgacatcagggactcggcggacatggtggagcttctggatggctacacccaccgtgtcctagcccgcttccacgggaggagccgcccacctctgtccttcaacgtctctctggacttcgtcatcttgtatttcttctctgatcgcatcaatcaggcccagggatttgctgttttataccaagccgtcaaggaagaactgccacaggagaggcccgctgtcaaccagacggtggccgaggtgatcacggagcaggccaacctcagtgtcagcgctgcccggtcctccaaagtcctctatgtcatcaccaccagccccagccacccacctcagactgtcccaggtagcaattcctgggcgccacccatgggggctggaagccacagagttgaaggatggacagtctatggtctggcaactctcctcatcctcacagtcacagccattgtagcaaagatacttctgcacgtcacattcaaatcccatcgtgttcctgcttcaggggaccttagggattgtcatcaaccagggacttcgggggaaatctggagcattttttacaagccttccacttcaatttccatctttaagaagaaactcaagggtcagagtcaacaagatgaccgcaatccccttgcaattcaggactcggaagtgacatcactcatctggtctcaggggcagcccagaagtatctgactgtagacacaactaggctccgtgggcatatctgggtggcaatttcagagggcagaggggacaccttcattgcctctcctcgcacagaaatggtgggctctctctggcccagcgtggtggttcatgcctgtaataccagcgttttgggaggctgagatgggaggattgcttgagcccaggaggtcgaggctgcagtgagctatgatcacaccaccacactccagcctgagcagcagagcgggacctcgtctctaagaatagaaagaaagaaagagaaacggtgtcctccgcacagccggtcagaactgtgtgactcacttgaggcaggaccgagagtgacatccagttgcacctttctcacctactttgggacctttgggggtgagttcccctttgtcctctcgtggaaacagcacacagcaagcaaccacaaaaccagagcggaaggagggacttcccaccggcatccggccccagtgccatgttttatcatctggaacggttgtgaagctttgtgtgacttgctcaggatcagcagtcaccatggtctaatcccaagagggactcgtcacccagagacctcaaaaggccccaggcctactgtggttttttctgagaggctcccagaaccaagtggcacgttggtttcctgtgcgtctgtgtctttgtgcctgtatctcgctgggggacttcacaggaagcaggatttgggcattcctgaagctcccagctggacaccactcctgagcgccacatcccatgatcacttcaaccacaggcctttgacttcgccacatggcaaggcacccagcagaagatgaggatgacgggtgatgctagatggatgtgtacctggtggatggcccacgcacgaagactcaagaccctcaggactggccatataatctgcaaggtccagtatgaaataagaataagcagcccacacaactgggcatagtggttcatgcctgtaatcccagcactttgggaggctgaggagggtggatcacttgaggccaggaattcgagaccagcctggccaacatggcgaaaacccatctctactaaaaatacaaaaattagttgggcatggtggcacacacctgtaatcccagctactcggaggctgaggcacaagaattgcttgaacctgggaggcggagtttgcagtgagctgagataacgccactgcactccagtgtaggcaacagagtgagaccctgtctc

SEQ ID NO: 1556 - protein, 492 aa, Homo sapien [sequence omitted]

SEQ ID NO: 1557 - DNA, 1809 bp, Homo sapien
gtgcgccctcggcgcgtacccgccgcgctcccatccccgccgccggccaggggcgcgctcggccgccccggacagtgtcccgctgcggctccgcggcgatggccaccaagatcgacaaagaggcttgccgggcggcgtacaacctggtgcgcgacgacggctcggccgtcatctgggtgacttttaaatatgacggctccaccatcgtccccggcgagcagggagcggagtaccagcacttcatccagcagtgcacagatgacgtccggttgtttgccttcgtgcgcttcaccaccggggatgccatgagcaagaggtccaagtttgccctcatcacgtggatcggtgagaacgtcagcgggctgcagcgcgccaaaaccgggacggacaagaccctggtgaaggaggtcgtacagaatttcgctaaggagtttgtgatcagtgatcggaaggagctggaggaagatttcatcaagagcgagctgaagaaggcggggggagccaattacgacgcccagacggagtaaccccagcccccgccacaccaccccttgccaaagtcatctgcctgctccccgggggagaggaccgccggcctcagctactagcccaccagcccaccagggagaaaagaagccatgagaggcagcgcccgccaccctgtgtccacagcccccaccttcccgcttcccttagaaccctgccgtgtcctatctcatgacgctcatggaacctctttctttgatcttctttttcttttctccccctcttttttgttctaaagaaaagtcattttgatgcaaggtcctgcctgccatcagatccgaggtgcctcctgcagtgaccccttttcctggcatttctcttccacgcgacgaggtctgcctagtgagatctgcatgacctcacgttgctttccagagcccgggcctattttgccatctcagttttcctggaccctgcttcctgtgtaccactgaggggcagctgggccaggagctgtgcccggtgcctgcagccttcataagcacacacgtccattccctactaaggcccagacctcctggtatctgccccgggctccctcatcccacctccatccggagttgcctaagatgcatgtccagcataggcaggattgctcggtggtgagaaggttaggtccggctcagactgaataagaagagataaaatttgccttaaaacttacctggcagtggctttgctgcacggtctgaaaccacctgttcccaccctcttgaccgaaatttccttgtgacacagagaagggcaaaggtctgagcccagagttgacggagggagtatttcagggttcacttcaggggctcccaaagcgacaagatcgttagggagagaggcccagggtggggactgggaatttaaggagagctgggaacggatcccttaggttcaggaagcttctgtgtaagctgcgaggatggcttgggccgaagggttgctctgcccgccgcgctagctgtgagctgagcaaagccctgggctcacagcaccccaaaagcctgtggcttcagtcctgcgtctgcaccacacattcaaaaggatcgttttgttttgtttttaaagaaaggtgagattggcttggttcttcatgagcacatttgatatagctctttttctgtttttccttgctcatttcgttttggggaagaaatctgtactgtattgggattgtaaagaacatctctgcactcagacagtttacagaaataaatgttttttttgtttttcagaaaaaaaaaaaaaaaaaaaaaaaaaaaaaaaaaaaaa

SEQ ID NO: 1558 - protein, 142 aa, Homo sapien
MATKIDKEACRAAYNLVRDDGSAVIWVTFKYDGSTIVPGEQGAEYQHFIQQCTDDVRLFAFVRFTTGDAMSKRSKFALITWIGENVSGLQRAKTGTDKTLVKEVVQNFAKEFVISDRKELEEDFIKSELKKAGGANYDAQTE

SEQ ID NO: 1559 - DNA, 1634 bp, Homo sapien
ggcacgaggaacccttcctgttgccttaggggaacgtggctttccctgcagagccggtgtctccgcctgcgtccctgctgcagcaaccggagctggagtcggatcccgaacgcaccctcgccatggactcggccctcagcgatccgcataacggcagtgccgaggcaggcggccccaccaacagcactacgcggccgccttccacgcccgagggcatcgcgctggcctacggcagcctcctgctcatggcgctgctgcccatcttcttcggcgccctgcgctccgtacgctgcgcccgcggcaagaatgcttcagacatgcctgaaacaatcaccagccgggatgccgcccgcttccccatcatcgccagctgcacactcttggggctctacctctttttcaaaatattctcccaggagtacatcaacctcctgctgtccatgtatttcttcgtgctgggaatcctggccctgtcccacaccatcagccccttcatgaataagttttttccagccagctttccaaatcgacagtaccagctgctcttcacacagggttctggggaaaacaaggaagagatcatcaattatgaatttgacaccaaggacctggtgtgcctgggcctgagcagcatcgttggcgtctggtacctgctgaggaagcactggattgccaacaacctttttggcctggccttctcccttaatggagtagagctcctgcacctcaacaatgtcagcactggctgcatcctgctgggcggactcttcatctacgatgtcttctgggtatttggcaccaatgtgatggtgacagtggccaagttcttcgaggcaccaataaaattggtgtttccccaggatctgctggagaaaggcctcgaagcaaacaactttgccatgctgggacttggagatgtcgtcattccagggatcttcattgccttgctgctgcgctttgacatcagcttgaagaagaatacccacacctacttctacaccagctttgcagcctacatcttcggcctgggccttaccatcttcatcatgcacatcttcaagcatgctcagcctgccctcctatacctggtccccgcctgcatcggttttcctgtcctggtggcgctggccaagggagaagtgacagagatgttcagttatgaggagtcaaatcctaaggatccagcggcagtgacagaatccaaagagggaacagaggcatcagcatcgaaggggctggagaagaaagagaaatgatgcagctggtgcccgagcctctcagggccagaccagacagatgggggctgggcccacacaggcgtgcaccggtagagggcacaggaggccaagggcagctccaggacagggcagggggcagcaggatacctccagccaggcctctgtggcctctgtttccttctccctttcttggccctcctctgctcctccccacaccctgcaggcaaaagaaacccccagcttcccccctccccgggagccaggtgggaaaagtgggtgtgatttttagattttgtattgtggactgattttgcctcacattaaaaactcatcccatggccaaaaaaaaaaaaaaaaaaaaaaaaaaaaaaaaaaaaaaaaaaaaaaaaaaaaaaa

SEQ ID NO: 1560 - protein, 377 aa, Homo sapien
MDSALSDPHNGSAEAGGPTNSTTRPPSTPEGIALAYGSLLLMALLPIFFGALRSVRCARGKNASDMPETITSRDAARFPIIASCTLLGLYLFFKIFSQEYINLLLSMYFFVLGILALSHTISPFMNKFFPASFPNRQYQLLFTQGSGENKEEIINYEFDTKDLVCLGLSSIVGVWYLLRKHWIANNLFGLAFSLNGVELLHLNNVSTGCILLGGLFIYDVFWVFGTNVMVTVAKFFEAPIKLVFPQDLLEKGLEANNFAMLGLGDVVIPGIFIALLLRFDISLKKNTHTYFYTSFAAYIFGLGLTIFIMHIFKHAQPALLYLVPACIGFPVLVALAKGEVTEMFSYEESNPKDPAAVTESKEGTEASASKGLEKKEK

SEQ ID NO: 1561 - DNA, 4692 bp, Homo sapien
gtggacccagggtggggaactacctcttcctctccacgcggttgagaagaccggtcggcctgggcaacctgcgctgaagatgccgggaaaactccgtagtgacgctggtttggaatcagacaccgcaatgaaaaaaggggagacactgcgaaagcaaaccgaggagaaagagaaaaaagagaagccaaaatctgataagactgaagagatagcagaagaggaagaaactgttttccccaaagctaaacaagttaaaaagaaagcagagccttctgaagttgacatgaattctcctaaatccaaaaaggcaaaaaagaaagaggagccatctcaaaatgacatttctcctaaaaccaaaagtttgagaaagaaaaaggagcccattgaaaagaaagtggtttcttctaaaaccaaaaaagtgacaaaaaatgaggagccttctgaggaagaaatagatgctcctaagcccaagaagatgaagaaagaaaaggaaatgaatggagaaactagagagaaaagccccaaactgaagaatggatttcctcatcctgaaccggactgtaaccccagtgaagctgccagtgaagaaagtaacagtgagatagagcaggaaatacctgtggaacaaaaagaaggcgctttctctaattttcccatatctgaagaaactattaaacttctcaaaggccgaggagtgaccttcctatttcctatacaagcaaagacattccatcatgtttacagcgggaaggacttaattgcacaggcacggacaggaactgggaagacattctcctttgccatccctttgattgagaaacttcatggggaactgcaagacaggaagagaggccgtgcccctcaggtactggttcttgcacctacaagagagttggcaaatcaagtaagcaaagacttcagtgacatcacaaaaaagctgtcagtggcttgtttttatggtggaactccctatggaggtcaatttgaacgcatgaggaatgggattgatatcctggttggaacaccaggtcgtatcaaagaccacatacagaatggcaaactagatctcaccaaacttaagcatgttgtcctggatgaagtggaccagatgttggatatgggatttgctgatcaagtggaagagattttaagtgtggcatacaagaaagattctgaagacaatccccaaacattgcttttttctgcaacttgccctcattgggtatttaatgttgccaagaaatacatgaaatctacatatgaacaggtggacctgattggtaaaaagactcagaaaacggcaataactgtggagcatctggctattaagtgccactggactcagagggcagcagttattggggatgtcatccgagtatatagtggtcatcaaggacgcactatcatcttttgtgaaaccaagaaagaagcccaggagctgtcccagaattcagctataaagcaggatgctcagtccttgcatggagacattccacagaagcaaagggaaatcaccctgaaaggttttagaaatggtagttttggagttttggtggcaaccaatgttgctgcacgtgggttagacatccctgaggttgatttggttatacaaagctctccaccaaaggatgtagagtcctacattcatcgatccgggcggacaggcagagctggaaggacgggggtgtgcatctgcttttatcagcacaaggaagaatatcagttagtacaagtggagcaaaaagcgggaattaagttcaaacgaataggtgttccttctgcaacagaaataataaaagcttccagcaaagatgccatcaggcttttggattccgtgcctcccactgccattagtcacttcaaacaatcagctgagaagctgatagaggagaagggagctgtggaagctctggcagcagcactggcccatatttcaggtgccacgtccgtagaccagcgctccttgatcaactcaaatgtgggttttgtgaccatgatcttgcagtgctcaattgaaatgccaaatattagttatgcttggaaagaacttaaagagcagctgggcgaggagattgattccaaagtgaagggaatggtttttctcaaaggaaagctgggtgtttgctttgatgtacctaccgcatcagtaacagaaatacaggagaaatggcatgattcacgacgctggcagctctctgtggccacagagcaaccagaactggaaggaccacgggaaggatatggaggcttcaggggacagcgggaaggcagtcgaggcttcaggggacagcgggacggaaacagaagattcagaggacagcgggaaggcagtagaggcccgagaggacagcgatcaggaggtggcaacaaaagtaacagatcccaaaacaaaggccagaagcggagtttcagtaaagcatttggtcaataattagaaatagaagatttatatagcaaaaagagaatgatgtttggcaatatagaactgaacattatttttcatgcaaagttaaaagcacattgtgcctccttttgaccacttgccaagtccctgtctctttcagacacagacaagcttcatttaaattatttcatctgatcattatcatttataactttattgttacttcttcatcagtttttccttttgaaaggtgtatgaattcattacatttttattctaatgtattatctgtagattagaagataaaatcaagcatgtatctgcctatactttgtgagttcacctgtctttatactcaaaagtgtcccttaatagtgtccttccctgaaataaatacctaagggagtgtaacagtctctggaggaccactttgagcctttggaagttaaggtttcctcagccacctgccgaacagtttctcatgtggtcctattatttgtctactgagacttaatactgagcaatgttttgaaacaagatttcaaactaatctgggttgtaatacagtttataccagtgtatgctctagacttggaagatgtagtatgtttgatgtggattacctatacttatgttcgttttgatacatttttagcttctcattataaggtgattcatgctttagtgaattcttcatagatagtatatataaaagtacattttaatagaaagccagggttttaaggaatttcacatgtataaggtggctccatagctttatttgtaagtaggctggataaatggtgcttaaatggtaatgtactccacttcttcctattggaagattaacattatttaccaagaaggacttaagggagtaaggggcgcagattagcattgctcaagagtatgtaaaaaaaaaaaaaaaaaaaagaaccaaaccactggaaataatcaaatgcaaaaaggtaacaaattcataactggaaagcaaagagaagaacaagtatgatttggatgataaagcattgttttaatggtgaaaacttcacagatcactaatgtttctagaggttaacttcaagtgggcaagctggggtttttaggtagtcagtggcctagttcctaaagccacagtataggatctgttaaactgaatgtctgttgaaagtttgttttagctgcttggaggcttccttttaagacaaactgtatgtgattaagttgttttgagggaactgaagaacctgatgtagcccctggccagataactgcctgatttctcagatattatttctctgggaaacattctacatagcacaggagcttaagagtggcattatcttctcgccttaatttccagagattatttctgtactgagaatcctggaactactatgctaggaaatttaaagctgcatggtctgtcttgttttcatttaattattgtgaatacctagaatctttcttggtcctgatttctcttgcttaatccagtctttatctctaactgccccttatttgatcaccatgtactaggagctctgatagccagctcagctcctaatccttgaggcaacattctttttctatttgaacttcagttctgtccttgaatcccgactagatatttcttgccctctggtctcagaattctcttggcttttattccttgatccacttgccagttttatcactttacccttgttcctcatggcttcccatcaagccatgggtattaggtgacagtgtaatttattagattctggttttgcccaaatactgggcatgctttaataataactgaaccatttcattatttggataggcatgggtaccttatcaagcagattaaaaggatatggtacccgtcctttagaaaagaacagctaaaaccttgttgtggattatggatttagcctaaagaaaaataatctggcataaattaagagtaagagagaagattaatagaaatttcacttcacataacttaaaacatggctatttcaataaaggactaaagtttctcctggatcccagaattcaacctgtatttataaatgtataatgtatttagctactttttggtttaaatgaacttgttgggttagcttggtaaatgttataatttttactgttttctacaaagaaaatattttctaatttaagttggagctatctgtgcagcagtttctctacagttgtgcataaatgtttttactataaaatgagctaatgtataaaatactgctgtataccataataaagatagtaatacttgaaaaaaa

SEQ ID NO: 1562 - protein, 809 aa, Homo sapien
WTQGGELPLPLHAVEKTGRPGQPALKMPGKLRSDAGLESDTAMKKGETLRKQTEEKEKKEKPKSDKTEEIAEEEETVFPKAKQVKKKAEPSEVDMNSPKSKKAKKKEEPSQNDISPKTKSLRKKKEPIEKKVVSSKTKKVTKNEEPSEEEIDAPKPKKMKKEKEMNGETREKSPKLKNGFPHPEPDCNPSEAASEESNSEIEQEIPVEQKEGAFSNFPISEETIKLLKGRGVTFLFPIQAKTFHHVYSGKDLIAQARTGTGKTFSFAIPLIEKLHGELQDRKRGRAPQVLVLAPTRELANQVSKDFSDITKKLSVACFYGGTPYGGQFERMRNGIDILVGTPGRIKDHIQNGKLDLTKLKHVVLDEVDQMLDMGFADQVEEILSVAYKKDSEDNPQTLLFSATCPHWVFNVAKKYMKSTYEQVDLIGKKTQKTAITVEHLAIKCHWTQRAAVIGDVIRVYSGHQGRTIIFCETKKEAQELSQNSAIKQDAQSLHGDIPQKQREITLKGFRNGSFGVLVATNVAARGLDIPEVDLVIQSSPPKDVESYIHRSGRTGRAGRTGVCICFYQHKEEYQLVQVEQKAGIKFKRIGVPSATEIIKASSKDAIRLLDSVPPTAISHFKQSAEKLIEEKGAVEALAAALAHISGATSVDQRSLINSNVGFVTMILQCSIEMPNISYAWKELKEQLGEEIDSKVKGMVFLKGKLGVCFDVPTASVTEIQEKWHDSRRWQLSVATEQPELEGPREGYGGFRGQREGSRGFRGQRDGNRRFRGQREGSRGPRGQRSGGGNKSNRSQNKGQKRSFSKAFGQ

SEQ ID NO: 1563 - DNA, 5356 bp, Homo sapien
tgcaatgcgtgttttactatctaaattaccaagaccatggattgtggatgagaagaaagatgatggttatactgccttacatctggctgcccttaataatcacgtagaagtggctgaactgttggtacatcagggtaatgcaaacctggatatccagaatgtgaaccaacaaactgccctacaccttgctgttgaacgacagcatacccagattgttaggcttttggtccgtgcaggtgccaagcttgatattcaggataaggatggggatactcctttgcatgaagctctaaggcatcacactttgtctcagctacgtcagctccaagatatgcaagatgtggggaaggtggatgctgcctgggagccatccaaaaacacgttaataatgggacttggtacccagggggcagagaagaagagtgcagcatctattgcctgtttcttggcagccaatggtgctgacctgagcattcgaaataagaagggtcaatcgccacttgatctctgtcctgatccgaatctctgcaaagcactggcaaagtgtcataaggaaaaagtcagtggtcaagtgggttctcggagtccttctatgattagtaatgattctgaaaccttagaagagtgtatggtgtgctcagatatgaagagagatactctttttggtccatgtggacatattgctacctgttctttatgttctccacgtgtcaagaaatgcctcatctgtaaagaacaggttcaatccaggacaaagattgaagaatgtgtggtatgctctgacaagaaagcagctgttctttttcaaccctgtggccacatgtgtgcttgtgagaactgtgctaacctgatgaaaaagtgtgtgcagtgtcgagcagtagttgaacgaagagtgcctttcattatgtgctgtggagggaaaagttcagaagatgccactgatgatatctcaagtgggaatattccagtattacaaaaggacaaggataataccaatgtcaatgcagatgtgcaaaagttgcagcaacagttacaagacattaaagagcagacaatgtgccctgtgtgtctagatcgtctgaagaatatgattttcctttgtggtcacggaacctgtcaactctgtggagaccgcatgagtgaatgtcctatctgtcgcaaggctattgaacgaaggattcttttgtattaactaagacacatggtgtattttgttagctaatgtatctagtcatgagatcttaataggcttttgatctagttggaagttctgatgagttaatttctaatatcatagtttctttactagagtataattgggctgtaaatgtaccagaacaaaaaaccctacaaaatggtgttggaaattgtgttttttgtttttgttttaaatttgaaacatcaaattcatgtaactcataggataatttacctttggcttctaagaggaaagtcctttaaggatatccttttttaaaaaattgcatttttctcttataatttgtaaatttgttggatctcaaaagacataattctttgtgatcagttatccttcatttcatcgtggttttacacagtgagttgataacaggttctctgagaagtcatgcatcaaataaaagaggcaggtcaaacaattatgtcacatggtaaattataaaatgacagtacaagttccagatagttaagggaataccgaagggatgattctttttttaagataacaggaagttacccacatgtttgtttctgaattcttagagtaaatggaagcatagaatgagggaataatgactttgcatttctcttgttttctagattcaaaaggaacattgtttaacttgaatcagattaccagtttcaaggtgactgatagacaagaaaaggaaaaataagcaataatagtgggcaactgaagagaaaaaaaaaacgagtatctattaactggccactaacagttgcctttcttacattaatttatacactattttgttcagccagtgtttttaaaaaaaatctatgaaaagtgtacttccggttttctgtgattacttatctgggcttgatctgaccagtgaaatgacattgccctatttggacctctgaggttctatttagctttgcagatgtacatagtatcccagtgatctgcaaaattaatgccttttccaagaaaaaatcttttcttctctgtatcagttaattctgacagtgttagtgattctgtcttcattataggccttatttccattatctctttctttatagtattttttgttataaagaaaacagtctttctgtgtatacctacggatgagggtattatttaaactgccaacaatatccaagacatggtcaataacctaattataaatactttagaaagagtgaccaggacatgtatagaaatgtctgcttacctgtagactttaaaaacaaacaaaaaaaacaaacaaaatttttggagcatttaatcattttttttctccttttatctcctttgtaatcttattgtctcctgagtaaatatacacataaatgtttggggattcattgctgctagattatatcaggtgtttacatagtgtctactatatgctgttgataagctttttcctaaaaatagttatcctcttttgtagtttttttccctcctttaaatctggctagcttttcttacttcagtttttatagaacaccaactaaatttgaaagtatgaagtctctagccctcttacactgtttctggctgtttaatccttgctgcctttgcaagtcctggtgaaagcaatggggagctttgctggctggttttgtagtctcaacaattccatgtctgtgtttagctgagtaactgctatcatttagaacagtaaaatttttatagatttcaaatttgaaaattcatgtacactcagttatctaataaggggccaccgacgctgtttttaaaactattttgaagttataaaaaggtagaacatctgactgatgatgttcacataaagagacagacagactatcatgttgcagacatgaaaacagcatgtcaggtttttcctttccttccatgccatgggctacccatctcttcccactagatcacctggtgaggagggagcacctggctgactcatgcagagtttggccaatcagagaattgtgtggtctccagctctactttccttaaacaaatcctttctgttttctgagctgcagtgctaaaacagatccctaaaaggtaatagcatcttccagactagtttaattatttcctttataagaatatgacataaatttttattatagaaataatgtcattataattttagtgctagtacttgtgggttttctgtatttgtatcaccttgaaatttgttccatgaatagaaaatacttctttattcatgttttcaatcacttagaattattttaaatttattttgggtttgtgagagataataagattaagaacttcatcatttcagtgactttcctccaactctctgaatctgctacctcttattatatgtcccttagcagtacttttccagttaggttcgttaccctcctcattagctaaacctctttatcttgtgcctcaaaagagcttttacttttcttagaaacatttataaaaaagaaaaaaactgacacgcattcattcaaaaaagtatttattgggctttagggattagatacacaacagtggaaaaatggcatcttagcacactcagaatttattgtgcagcagttgtgtattttaaggaatctgtagttaaaaggaagagatccaaaggtcctgataacatttcctaacgtttcagaagagttgtcattgagtagtgtttggatttcctctctgtatccctcaccctaccattttctcctttattcttctaagattgttagcgttgttactcaaaacatacacatacaacataccagatggtgctgttctaatggtatttgttcacgtaatttaacgttcttactgcttatactatatacatatttaattttgttgggagcaagaaggttttcaagaaaagataattttgtattagtgtaggaatatattagacaaatgtttagttggtcaaattatgcataagatatttgtaactttaaacattgcaaattgaccagctagctatggaagcataaaattaattgataattaatgttggaaatacatttctaaaatttatatttttatggtgttagcctgtaagagcattttagcatattgaaatgcatgctgcttaagatgtgtctggttcaaatatcaaaacttgctgggtcatttttacatagtagaaacatactgtctatgtgttgcccaattgctgtttgtccactctgaattctggaccctttttggactaagaattagttaaattcatgaactaagagaattagagatggggtagagtaggatcaggacagtggggttacaacagataggaaaggaaagtcagcatttgagtgtagagaaaaaaagaggatcatacagatgtcatcaaattataggctttaatacaggttgctttttttaatccaaaaggaaaagcacttatcctatcagaatgtctaccatgttttatagtaataatttgtgtaaaaaattgaatttttgaatagttttttgtattttttgtgatgaaaaactcataacataaaatttaccatattaactgtttctaaagaatacagttcagccatgtgaagtacatttacactgttgtgaaacagatctccagaactttttcatcttgcaaaactgaaactccatacccattaaacaactcccctttttgttttctcctcagtggaatagaattttgactccatataaatcaagaaacacctaaattctttagttgtttgtgtttgcaagatctaaggtcatggtaaacattaagttcttaaaatttttgggagggacagtgcacctctcctctgaattgttagcaattaaattgagtaggttttaaatgtctattcattggaagggtttgttatttcattttgagccagaggggagaggcacattttaaatatcagaattagattagctttgagtttgtacaattgggaacataatagattttcataaattatgtgtgccttgttggaagtgtcaactgtctttatgtctgcttgtaaaagtttcaaaatatgttttccctcaaaaaggcaacgttacttcatttgcttgaatattatgataggaatgcttactgatattacttgatagtcatatatagcctaggaaatttaacatatatataactatagcagtattaataatgatagttgtacttctttaaaacattaaatttgaggaaacttt

SEQ ID NO: 1564 - protein, 396 aa, Homo sapien
AMRVLLSKLPRPWIVDEKKDDGYTALHLAALNNHVEVAELLVHQGNANLDIQNVNQQTALHLAVERQHTQIVRLLVRAGAKLDIQDKDGDTPLHEALRHHTLSQLRQLQDMQDVGKVDAAWEPSKNTLIMGLGTQGAEKKSAASIACFLAANGADLSIRNKKGQSPLDLCPDPNLCKALAKCHKEKVSGQVGSRSPSMISNDSETLEECMVCSDMKRDTLFGPCGHIATCSLCSPRVKKCLICKEQVQSRTKIEECVVCSDKKAAVLFQPCGHMCACENCANLMKKCVQCRAVVERRVPFIMCCGGKSSEDATDDISSGNIPVLQKDKDNTNVNADVQKLQQQLQDIKEQTMCPVCLDRLKNMIFLCGHGTCQLCGDRMSECPICRKAIERRILLY

SEQ ID NO: 1565 - DNA, 5443 bp, Homo sapien
ctggagcagctgaaaccggtttgagcgtggctgcttcctgccgctcgacgccgcggcaggccgcctgggggagcgctggcgaggcacggacggcgggcgcccggtacctctgcccgcggtcctcgctctcgggcggggcggcggcgacgcggacctgcggactagcgaacccggagcacgacatcataaaataaatccatcagaatgacaccttctcaggttgcctttgaaataagaggaactcttttaccaggagaagtttttgcgatatgtggaagctgtgatgctttgggaaactggaatcctcaaaatgctgtggctcttcttccagagaatgacacaggtgaaagcatgctatggaaagcaaccattgtactcagtagaggagtatcagttcagtatcgctacttcaaagggtactttttagaaccaaagactatcggtggtccatgtcaagtgatagttcacaagtgggagactcatctacaaccacgatcaataacccctttagaaagcgaaattattattgacgatggacaatttggaatccacaatggtgttgaaactctggattctggatggctgacatgtcagactgaaataagattacgtttgcattattctgaaaaacctcctgtgtcaataaccaagaaaaaattaaaaaaatctagatttagggtgaagctgacactagaaggcctggaggaagatgacgatgatagggtatctcccactgtactccacaaaatgtccaatagcttggagatatccttaataagcgacaatgagttcaagtgcaggcattcacagccggagtgtggttatggcttgcagcctgatcgttggacagagtacagcatacagacgatggaaccagataacctggaactaatctttgattttttcgaagaagatctcagtgagcacgtagttcagggtgatgcccttcctggacatgtgggtacagcttgtctcttatcatccaccattgctgagagtggaaagagtgctggaattcttactcttcccatcatgagcagaaattcccggaaaacaataggcaaagtgagagttgactatataattattaagccattaccaggatacagttgtgacatgaaatcttcattttccaagtattggaagccaagaataccattggatgttggccatcgaggtgcaggaaactctacaacaactgcccagctggctaaagttcaagaaaatactattgcttctttaagaaatgctgctagtcatggtgcagcctttgtagaatttgacgtacacctttcaaaggactttgtgcccgtggtatatcatgatcttacctgttgtttgactatgaaaaagaaatttgatgctgatccagttgaattatttgaaattccagtaaaagaattaacatttgaccaactccagttgttaaagctcactcatgtgactgcactgaaatctaaggatcggaaagaatctgtggttcaggaggaaaattccttttcagaaaatcagccatttccttctcttaagatggttttagagtctttgccagaagatgtagggtttaacattgaaataaaatggatctgccagcaaagggatggaatgtgggatggtaacttatcaacatattttgacatgaatctgtttttggatataattttaaaaactgttttagaaaattctgggaagaggagaatagtgttttcttcatttgatgcagatatttgcacaatggttcggcaaaagcagaacaaatatccgatactatttttaactcaaggaaaatctgagatttatcctgaactcatggacctcagatctcggacaacccccattgcaatgagctttgcacagtttgaaaatctactggggataaatgtacatactgaagacttgctcagaaacccatcctatattcaagaggcaaaagctaagggactagtcatattctgctggggtgatgataccaatgatcctgaaaacagaaggaaattgaaggaacttggagttaatggtctaatttatgataggatatatgattggatgcctgaacaaccaaatatattccaagtggagcaattggaacgcctgaagcaggaattgccagagcttaagagctgtttgtgtcccactgttagccgctttgttccctcatctttgtgtggggagtctgatatccatgtggatgccaacggcattgataacgtggagaatgcttagtttttattgcacagaggtcattttgggggcgtgcaccgctgttctgggtattcatttttcatcactgagcattgttgatctatgccttttgggcttctcagttcaatgaagcaataatgaagtatttaactctttcactacagttcttgcaagtatgctatttaaattacttggccaggtataattgccagtcagtctctttatagtgagaaaatttattggttagtaatataaatattttaaactaaatatataaatctataatgttaaacatatgttcattaaaagcatagcactttgaaattaactatataaatagctcatatttacacttacagcttttcatttgatcaggtctgaaatctttagcacttaaggaaaatgactatgcataattatacctgaccatgaaaaaaataagtacctcaaatgcatgcatttgcactggtgattccaactgcacaaatctttgtgccatcttgtatataggtattttttacatgggttgacatgcacacaacaccattttcattcagtatgaaccttgaggctgctgccatttttccacttaaccaaaccagcctgaaggtgaacctcgaaacttgtttcataaatctttcaaaagttgttttacatcaatgttaaaatttcaaaatgctgcagggtaatttaatgtataaaatattagtaagaaaaagtatgtattgcatacttagtagaatagatcacaacatacaaattcaattcagtgcatgctttaggtgttaagcatgagattgtacatgtttactgttaggtccttgcatctgtggtgctaggtgagtatgagaagatgtcaaggactggacgtattttgttgcctaaaaaaaaaaggctgtttgtaggcgttttaaatatgcttattttgtgtgtctctcactacctattacacactgttgctttgtgggtttgttttgtatgtgcgtgtgttatacagtagttaaatttccatgcagaaaaataaatgtcctgaattctcatattagtattctttattgtatatcatgcatgtaatttatttagaaatgtaggtcttactaaatgtatatgcatgtatttcagattatactaggatttcttggattagaagctgattgtgttaactgtaacttaaagaatgaatgttaaataaaatgatacagatttattttcttcattacaaaatgaaatttcaagaaggtgttacttttgtagaatggttttataatatgacaagaaattttaatatagtgtctaccctaaagggatggcttatttgcatctaccttttactgcatgtttttcacaaggcagtttattcatatattgacatattttggtagtagctgagaacctaagacttgaaattatacattgtgtagtattttttaagctaagcaatgcaattttggtcagatcttatttgtgtgaagataggctctgaaatcctatggtattgcgtttgtaacgttgatattaatgcaaaatagtttaggaaatggagtcttctgcaagggttctgtatacttttcccacattgtatgagattttccaaaattttggtgtgaattgggcacttttggaaaactcctgaaaaagaattagtttccttcatctgcagacctttgtccaatacggttaccatttctttatagtaactcgattagccatatatgtttgtttctagtcctgctcctttgctcctctcctatgccttcccagtgctggctccattttgaagactcaaggacagaggggaagcagatcataaagagaaaaaggagacagaagaaaggatgaaggaaggaggtcatggggagtgtggcttctgagcagtttagttgctggggagagcagacagtcactgcctacaatacagacagaaccttcctgctcactttctgtcctatctcttcctgaccttatgaaccagtgttagtagatgattaaaacatgacaagcaatggctccttattttcacaggactaagtccgggccttcgtatcactagctgttgccttttacaccctgcttcagccaccctgtccctgtcattggccctggacttcctctctgtgcccgtgtgtcctctgcctgggagccctctcctcccatagtcactttctctctgccaaactcatttcttcttgtgcccaagacctctctcctgagcccctgtggaaacttcaggaaggatgaatccgtctttgtgctccacggctcgtaccttgatcaggctgtgcatcacagtaattccgttctaggtaggcagagttgatctttgtctcatctgccaggctgcgggctcttcaagggcagggaccttgtcatagtcatttttattttcacagtgcttggaacatggtggaaaatgaatgttggaattattggagtaatataatttgtatcaaatgtccttttgaattaagagatttagttatgtttactaagaatgtaaactttgaattggtttgcattttaacaattaggatggtttattgatgtgaattttgaaatgtagaggtataatgttaaattattttatactttatggaaatcaagtgaaatgtttgaaaaaatgccgccattatcctctggtattttctactctctggaattatgtgctgtaaatgatcggctgtaaatgtgaggcacaccacccacccctgtgtggaaagtgttgtggcgcttcctgccacccacccacctctctgccgttgctccttgtgacacttgtctgtcgtctcccatccaaactccaagcttacagctacctcagtactgctttgcttgtctgaaacacctcctttgccttccttcagtgtcccgctcaggtgcagcctcctccctaaagctcatctcagcttttgatctgaatgatgatggaaacatgcagacagcctctcagtcttactatttaatgttgtagctgggaaaaaacccagagaggttaactgatatactgggttgggactaggatgtgggttttgtgactctgaatcccatgttctcaaactacgctgccttccgaagtctggcatttgttagctcatgcttccttgtagtccagcttcttatgtgcctgttatattctccagtaagattgtaagccccttaagggcagggacgtctttgcatctctagcactgctatagtgttctatccttagttatgaactagataaataaatggtggtggcaac

SEQ ID NO: 1566 - protein, 677 aa, Homo sapien
NKSIRMTPSQVAFEIRGTLLPGEVFAICGSCDALGNWNPQNAVALLPENDTGESMLWKATIVLSRGVSVQYRYFKGYFLEPKTIGGPCQVIVHKWETHLQPRSITPLESEIIIDDGQFGIHNGVETLDSGWLTCQTEIRLRLHYSEKPPVSITKKKLKKSRFRVKLTLEGLEEDDDDRVSPTVLHKMSNSLEISLISDNEFKCRHSQPECGYGLQPDRWTEYSIQTMEPDNLELIFDFFEEDLSEHVVQGDALPGHVGTACLLSSTIAESGKSAGILTLPIMSRNSRKTIGKVRVDYIIIKPLPGYSCDMKSSFSKYWKPRIPLDVGHRGAGNSTTTAQLAKVQENTIASLRNAASHGAAFVEFDVHLSKDFVPVVYHDLTCCLTMKKKFDADPVELFEIPVKELTFDQLQLLKLTHVTALKSKDRKESVVQEENSFSENQPFPSLKMVLESLPEDVGFNIEIKWICQQRDGMWDGNLSTYFDMNLFLDIILKTVLENSGKRRIVFSSFDADICTMVRQKQNKYPILFLTQGKSEIYPELMDLRSRTTPIAMSFAQFENLLGINVHTEDLLRNPSYIQEAKAKGLVIFCWGDDTNDPENRRKLKELGVNGLIYDRIYDWMPEQPNIFQVEQLERLKQELPELKSCLCPTVSRFVPSSLCGESDIHVDANGIDNVENA

SEQ ID NO: 1567 - DNA, 834 bp, Homo sapien
caagaatccactgaacagagggaagcaaaccttttggaaactggcttttgggcagacagtaaacgtccagtttgatgctggaagcatgaacagcttcatcaggtaggtactcctcaactctgatgagtttgtcctttcagcctaagggggtggaagggagttgtttgagaatagcaaatacgcatgttgattgcgagtgtgtggagacaaaggcagttcccaccacagttaggtcctggccgttgtgttgtttcctcgcctgcgatgctccttgtacgtcctcaccctcctctcccgcctctgccttctgctgggtcaaaggtggcctttttctctccagccttgaattgttccctgttggcttcccaagggcccatctgctggtacagtccacacttccaaagccaagacccgagagggctttcactgccccaagcctctctcctgtgaccttgggattctgtcttggcagaatcctttgtcagcggctcttgctctgtccttcctgtttggccacagctctttcaatcaatgggtattctagaaccgcaggatgtcagagctggaagggacgcgataccggtttacacaaggggaaactcctcgaggctctgggagggacggagggttttggtgacagagcgagagctaaaattgaggattcctgaatccagatcttgcctcccatcagccatctttctcccagagcctcgaggagtttccccttgtgtaaaccggtatcgcgtcccttccagctctgacatcctgcggttctagaatacccattgattgaaagagctgtggccaaacagcaaggacagagcaagagccgct

SEQ ID NO: 1568 - protein, 181 aa, Homo sapien [sequence omitted]

SEQ ID NO: 1569 - DNA, 4788 bp, Homo sapien
aaccatagaacatgggaataggttttattttcatctcaagaacatttaagttgggtgaagaaattcagcttttgttgttagaatctgacaggcttcaaacacttgtgatggaggggttgttgtcatatcaaagtccacctagtaaagttttaggtgaccagtgactttgtcaattaggtctgctggtcctggcccaatccctaggacagtttgagagcctggtgcaatctgagtacgtccagcatcttgaattaaacttacagtcagtcccagcatttttgcatgggccaataatgcaatcagggtttcttcatcaggagctttgaccaccaccttgggctggccacagtattcccattgtttgagcatttcaggatttcttctttgaatctgcttgtaggctgaaacagcagcatgagagcactgggcagccactttcccttttcccatctttaagtcatttcgaaccacaagaatcatcttgtactccccgctgtctcccaagatgcttgcttcactttcagtatctgtgtgtgtcttgctcgtcttgcttttggggagcatcccaaagcatactcgaaggctccagccccaggcacatgccacaagcaactccaacagccaagccgagtgtactgggatgagccaaatattccataaccaaggatttggagggcatctacagtacctcctttcctcactcgcgccttcccttcttctgggcagcgaacacgtttctatcgcgtgagctacctcttccggggttcctgggtgacaagttccggatcaagaatcacaaagcgagcagtcattcttcctcttgccacacccacagggcccgcactaagagcctaactgaaatcccgcgaggatcaaccgagctcgccgaaaggagggaggaacgtatcccttctggaggctgtctcagggggcagagggaccggaccggaagtgacgtgagcgggttccggttgtctggagcccagcggcgggtgtgagagtccgtaaggagcagcttccaggatcctgagatccggagcagccgggggtcggagcggctcctcaagagttactgatctatgaaatggcagagaatggaaaaaattgtgaccagagacgtgtagcaatgaacaaggaacatcataatggaaatttcacagacccctcttcagtgaatgaaaagaagaggagggagcgggaagaaaggcagaatattgtcctgtggagacagccgctcattaccttgcagtatttttctctggaaatccttgtaatcttgaaggaatggacctcaaaattatggcatcgtcaaagcattgtggtgtcttttttactgctgcttgctgtgcttatagctacgtattatgttgaaggagtgcatcaacagtatgtgcaacgtatagagaaacagtttcttttgtatgcctactggataggcttaggaattttgtcttctgttgggcttggaacagggctgcacacctttctgctttatctgggtccacatatagcctcagttacattagctgcttatgaatgcaattcagttaattttcccgaaccaccctatcctgatcagattatttgtccagatgaagagggcactgaaggaaccatttctttgtggagtatcatctcaaaagttaggattgaagcctgcatgtggggtatcggtacagcaatcggagagctgcctccatatttcatggccagagcagctcgcctctcaggtgctgaaccagatgatgaagagtatcaggaatttgaagagatgctggaacatgcagagtctgcacaagactttgcctcccgggccaaactggcagttcaaaaactagtacagaaagttggattttttggaattttggcctgtgcttcaattccaaatcctttatttgatctggctggaataacgtgtggacactttctggtacctttttggaccttctttggtgcaaccctaattggaaaagcaataataaaaatgcatatccagaaaatttttgttataataacattcagcaagcacatagtggagcaaatggtggctttcattggtgctgtccccggcataggtccatctctgcagaagccatttcaggagtacctggaggctcaacggcagaagcttcaccacaaaagcgaaatgggcacaccacagggagaaaactggttgtcctggatgtttgaaaagttggtcgttgtcatggtgtgttacttcatcctatctatcattaactccatggcacaaagttatgccaaacgaatccagcagcggttgaactcagaggagaaaactaaataagtagagaaagttttaaactgcagaaattggagtggatgggttctgccttaaattgggaggactccaagccgggaaggaaaattcccttttccaacctgtatcaatttttacaacttttttcctgaaagcagtttagtccatactttgcactgacatactttttccttctgtgctaaggtaaggtatccaccctcgatgcaatccaccttgtgttttcttagggtggaatgtgatgttcagcagcaaacttgcaacagactggccttctgtttgttactttcaaaaggcccacatgatacaattagagaattcccaccgcacaaaaaaagttcctaagtatgttaaatatgtcaagctttttaggcttgtcacaaatgattgctttgttttcctaagtcatcaaaatgtatataaattatctagattggataacagtcttgcatgtttatcatgttacaatttaatattccatcctgcccaacccttcctctcccatcctcaaaaaagggccattttatgatgcattgcacaccctctggggaaattgatctttaaattttgagacagtataaggaaaatctggttggtgtcttacaagtgagctgacaccattttttattctgtgtatttagaatgaagtcttgaaaaaaactttataaagacatctttaatcattccaaaattgtgtccgttttcttgagcgttttgattttttacttttagcttataccagctgaatggcagccttgcctaatccacctacaacaagaatttcttaagctttcttttatttgcatgagagagccactaccaaggcatgttttgttatgctgaaactgggctgctgcatactgctaaatggcacctctgggattggcctacctggggatttcttggtttgtgaaaacaggagaggagaaatatctcatacaagtgaaaggatactggagagagaaattacccatttctaaaaaaaaaccacactctgtcgtatctgtgttaatgttttctagcatgtactctggtttcaacagacacaaatttatatgttaacccagttttcttgccgttctgtaagtgttttattcttagtgtgatttttttccattgggatgtttttgattgaacttgttcattttgttttgcttgggaggaaaataaacaattttacttttttcctttaggagcattatgagcattatgtcagaatagaatagaattggggttcgatcttaacaggccagaaatgcctgggtttttttggtttgtttttgtttttgtttttttatcaaatcctgcctgactgtctgcttgttttgcctaccatcgtgacatctccatggctgtaccaccttgtcgggtagcttatcagactgatgttgactgttgaatctcatggcaacaccagtcgatgggctgtctgacattttggtatctttcatctgaccatccatatccaatgttctcatttaaacattacccagcatcattgtttataatcagaaactctggtccttctgtctggtggcacttagagtcttttgtgccataatgcagcagtatggagggaggattttatggagaaatggggatagtcttcatgaccacaaataaataaaggaaaactaagctgcattgtgggttttgaaaaggttattatacttcttaacaattctttttttcagggacttttctagctgtatgactgttacttgaccttctttgaaaagcattcccaaaatgctctattttagatagattaacattaaccaacataattttttttagatcgagtcagcataaatttctaagtcagcctctagtcgtggttcatctctttcacctgcattttatttggtgtttgtctgaagaaaggaaagaggaaagcaaatacgaattgtactatttgtaccaaatctttgggattcattggcaaataatttcagtgtggtgtattattaaatagaaaaaaaaaattttgtttcctaggttgaaggtctaattgatacgtttgacttatgatgaccatttatgcactttcaaatgaatttgctttcaaaataaatgaagagcagctgtccttctttcctcttttaagtgttcagctgtggcatgctcagaggttcctgctggattccagctggagcggtgtgatacccttctttttcagctgttcgtgccttcctttcttgtatccaccaaagtggagacaaatacatgatctcaaagatacacagtacctacttaattccagctgatgggagaccaaagaatttgcaagtggatggtttggtatcactgtaaataaaaagagggcctgggaattcttgcgattccatctctactttgtataagtctcattttgtgccttacacatctgcagtatttatcatgttccaacttggtgactgtcaggcagtgcaatacatcagcagtttatcaccgaagagctgaggaatacctcccttaaaacagacaatgtc

SEQ ID NO: 1570 - protein, 406 aa, Homo sapien
MAENGKNCDQRRVAMNKEHHNGNFTDPSSVNEKKRREREERQNIVLWRQPLITLQYFSLEILVILKEWTSKLWHRQSIVVSFLLLLAVLIATYYVEGVHQQYVQRIEKQFLLYAYWIGLGILSSVGLGTGLHTFLLYLGPHIASVTLAAYECNSVNFPEPPYPDQIICPDEEGTEGTISLWSIISKVRIEACMWGIGTAIGELPPYFMARAARLSGAEPDDEEYQEFEEMLEHAESAQDFASRAKLAVQKLVQKVGFFGILACASIPNPLFDLAGITCGHFLVPFWTFFGATLIGKAIIKMHIQKIFVIITFSKHIVEQMVAFIGAVPGIGPSLQKPFQEYLEAQRQKLHHKSEMGTPQGENWLSWMFEKLVVVMVCYFILSIINSMAQSYAKRIQQRLNSEEKTK

SEQ ID NO: 1571 - DNA, 953 bp, Homo sapien
agtccctgcattgcgcgcgacccggcggcgggacaggcttgctgcttcctcctcctcggcctcaccattccagaccaaaattgaaaaaatggttgacctcacccaggtaatggatgatgaagtattcatggcttttgcatcctatgcaacaattattctttcaaaaatgatgcttatgagtactgcaactgcattctatagattgacaagaaaggtttttgccaatccagaagactgtgtagcatttggcaaaggagaaaatgccaagaagtatcttcgaacagatgacagagtagaacgtgtacgcagagcccacctgaatgaccttgaaaatattattccatttcttggaattggcctcctgtattccttgagtggtcccgacccctctacagccatcctgcacttcagactatttgtcggagcacggatctaccacaccattgcatatttgacaccccttccccagccaaatagagctttgagtttttttgttggatatggagttactctttccatggcttacaggttgctgaaaagtaaattgtacctgtaaagaaaatcatacaactcagcatccagttggctttttaagaattctgtacttccaatttataatgaatactttcttagattttaggtaggaggggagcagaggaattatgaactggggtaaacccattttgaatattagcattgccaatatcctgtattcttgttttacatttggattagaaatttaacatagtaattcttaagtcttttgtctgatttttaaagtactttcttataaatttggatcatgttatgatttgtaacattcacacaacacctcacttttgaatctataaaagaattgcacgtatgagaaacctatatttcaatactgctgaaacagacatgaaataaagaatttaaagaatcaaaaaaaaaaaaaaaaaaaaaaaaaaaaa

SEQ ID NO: 1572 - protein, 155 aa, Homo sapien
MVDLTQVMDDEVFMAFASYATIILSKMMLMSTATAFYRLTRKVFANPEDCVAFGKGENAKKYLRTDDRVERVRRAHLNDLENIIPFLGIGLLYSLSGPDPSTAILHFRLFVGARIYHTIAYLTPLPQPNRALSFFVGYGVTLSMAYRLLKSKLYL

SEQ ID NO: 1573 - DNA, 6160 bp, Homo sapien
ctcgcgaggagagcggagcaggcgcgcggcccaggcggaggagcgccgactctggagcagccggagctggaagaggaggaggaggagaggcggcggggaaggaggaggagggggagagtcgctcccgccgggcgagcatggggcgcctggcctcgaggccgctgctgctggcgctcctgtcgttggctctttgccgagggcgtgtggtgagagtccccacagcgaccctggttcgagtggtgggcactgagctggtcatcccctgcaacgtcagtgactatgatggccccagcgagcaaaactttgactggagcttctcatctttggggagcagctttgtggagcttgcaagcacctgggaggtggggttcccagcccagctgtaccaggagcggctgcagaggggcgagatcctgttaaggcggactgccaacgacgccgtggagctccacataaagaacgtccagccttcagaccaaggccactacaaatgttcaacccccagcacagatgccactgtccagggaaactatgaggacacagtgcaggttaaagtgctggccgactccctgcacgtgggccccagcgcgcggcccccgccgagcctgagcctgcgggagggggagcccttcgagctgcgctgcactgccgcctccgcctcgccgctgcacacgcacctggcgctgctgtgggaggtgcaccgcggcccggccaggcggagcgtcctcgccctgacccacgagggcaggttccacccgggcctggggtacgagcagcgctaccacagtggggacgtgcgcctcgacaccgtgggcagcgacgcctaccgcctctcagtgtcccgggctctgtctgccgaccagggctcctacaggtgtatcgtcagcgagtggatcgccgagcagggcaactggcaggaaatccaagaaaaggccgtggaagttgccaccgtggtgatccagccatcagttctgcgagcagctgtgcccaagaatgtgtctgtggctgaaggaaaggaactggacctgacctgtaacatcacaacagaccgagccgatgacgtccggcccgaggtgacgtggtccttcagcaggatgcctgacagcaccctacctggctcccgcgtgttggcgcggcttgaccgtgattccctggtgcacagctcgcctcatgttgctttgagtcatgtggatgcacgctcctaccatttactggttcgggatgttagcaaagaaaactctggctactattactgccacgtgtccctgtgggcacccggacacaacaggagctggcacaaagtggcagaggccgtgtcttccccagctggtgtgggtgtgacctggctagaaccagactaccaggtgtacctgaatgcttccaaggtccccgggtttgcggatgaccccacagagctggcatgccgggtggtggacacgaagagtggggaggcgaatgtccgattcacggtttcgtggtactacaggatgaaccggcgcagcgacaatgtggtgaccagcgagctgcttgcagtcatggacggggactggacgctaaaatatggagagaggagcaagcagcgggcccaggatggagactttattttttctaaggaacatacagacacgttcaatttccggatccaaaggactacagaggaagacagaggcaattattactgtgttgtgtctgcctggaccaaacagcggaacaacagctgggtgaaaagcaaggatgtcttctccaagcctgttaacatattttgggcattagaagattccgtgcttgtggtgaaggcgaggcagccaaagcctttctttgctgccggaaatacatttgagatgacttgcaaagtatcttccaagaatattaagtcgccacgctactctgttctcatcatggctgagaagcctgtcggcgacctctccagtcccaatgaaacgaagtacatcatctctctggaccaggattctgtggtgaagctggagaattggacagatgcatcacgggtggatggcgttgttttagaaaaagtgcaggaggatgagttccgctatcgaatgtaccagactcaggtctcagacgcagggctgtaccgctgcatggtgacagcctggtctcctgtcaggggcagcctttggcgagaagcagcaaccagtctctccaatcctattgagatagacttccaaacctcaggtcctatatttaatgcttctgtgcattcagacacaccatcagtaattcggggagatctgatcaaattgttctgtatcatcactgtcgagggagcagcactggatccagatgacatggcctttgatgtgtcctggtttgcggtgcactcttttggcctggacaaggctcctgtgctcctgtcttccctggatcggaagggcatcgtgaccacctcccggagggactggaagagcgacctcagcctggagcgcgtgagtgtgctggaattcttgctgcaagtgcatggctccgaggaccaggactttggcaactactactgttccgtgactccatgggtgaagtcaccaacaggttcctggcagaaggaggcagagatccactccaagcccgtttttataactgtgaagatggatgtgctgaacgccttcaagtatcccttgctgatcggcgtcggtctgtccacggtcatcgggctcctgtcctgtctcatcgggtactgcagctcccactggtgttgtaagaaggaggttcaggagacacggcgcgagcgccgcaggctcatgtcgatggagatggactaggctggcccgggaggggagtgacagagggacgttctaggagcaattggggcaagaagaggacagtgatattttaaaacaaagtgtgttacactaaaaaccagtcctctctaatctcaggtgggacttggcgctctctcttttctgcatgtcaagttctgagcgcggacatgtttaccagcacacggctcttcttcccacggcactttctgatgtaacaatcgagtgtgtgttttcccaactgcagctttttaatggttaaccttcatctaattttttttctcccactggtttatagatcctctgacttgtgtgtgtttatagcttttgtttcgcggggttgtggtgaggaaggggtgatggcatgcggagttctttatcttcagtgagaatgtgcctgcccgcctgagagccagcttccgcgttggaggcacgtgttcagagagctgctgagcgccaccctctacccggctgacagacaacacagacctgtgccgaaggctaatttgtggcttttacgaccctaccccaccccctgttttcaggggtttagactacatttgaaatccaaacttggagtatataacttcttattgagcccaactgctttttttttttttttttttgcttctctgccccttttccatttcttttgtatttgttttctgtgagagcactgaaatggcagccctggaatctacaatttggctctccactgagcaccttatcttgccaccttagccttaagaatgaatatgaagaaaaatacacagccacctctgtccagggcagtaagaagggctgcaaggaaggggaggatggggacaaggaaaggatcagatacctgctccagtagttgtgaggccactgtgtctcaggggactccaggaggagcagaagagggatcccacgaagttattcttacgcagctggggccaggagggtcagagtggtgccaggtgcaagttaggctaaagaagccaccactattcctctctcttgcccattgtggggggcaaaggcattggtcaccaagagtcttgcagggggacccacagatatgccatgtccttcacacgtgcttgggctccttaacctgaaggcaaattgctacttgcaagactgactgacttcaaggaatcagaaattacctagaagcaccatgttttttctatgaccttttcagtccttcaggtcattttaaggtccactgcagggggttagtgagaaagggtatactttgtggtatgttttgctttcctaatagggacatgaaggaaacccagcaatttgctgttatgtgaatggcctgtagagcagagtcaagagcggtgtgctttgcccgactgctcccatcaggaataggagagtagacagagatcttccacatcccaggcttctgctgctgctttaaaagctctgtccttggagcctcccgctccctgaagtgtctcgccccctgcacagcactggcctttcggaagcatcccagtagggttttctgaggctcgctggtgactcatgccctaattgcaatcctctgcttttatcttgactttgaaggatctaacactgctctctcttccaaaggggaaaaaaagattcatttgttttgagcaataaactaatacaaaatgatggccattcatgtgcagctctttgtcaccatgggccggatgagttgtgctcctcctggctcaccatttccccctgctcccccacagccggttctgcacttatcaccgagtcgcccctggaagcagattcccattgagttttccccaccaaggggaccatgcacatggtagaaacattagattctgcattgacagtagcctttccttggcccgggcctgtggtgggaagacgggcaacaagtataccccaccagggcctgagtgactagaggaagaggacgaggccttgttggcactagatttgggtattttctgcatgtcataacatatcctaactgctatttcagaagaggcagcttgtaggtgattgtacaagtgagaattaaagagagaacagatatttaaacaggtgctgtattagtaacagccagtgccctttcagcccttgcatctattaaaaggagattcaggattttattggcacaggcccttcttagtaggaagaaagggtgcttagctttggacctgaccgggtgtgtgtaaaaccatggactgagtcacagcagacactcgatggtggtaaatgtgatgggtgcttacacactgtaccttttcctttcatactgatgctgcagttcagggctggagttgttaaggcattgacctccacccacctgccccatgtccactgggctgcccaagctgcatgtcacctgagggctggcaggaaggggcgagaaatcccagggcattgtaccaaggacctagttccttctagggatataaatttccaggaatgtgtatttttaatgtggtgagatgcactcttttgttgtaccaaatagggctccccaccccacccctgcgacaagtgctcttctagaacaggttcctaccagcagcactggtgtgaatgaaagagagacccagccgcgtctcacacaggtggaattgcacttcttaacaaaaaggaactttataaaagtttgggattttttttcctaatcataaaaatagccccagaaagagcctaagctatgttcagatagaagcctcgaaattcctgtaaattgtttactttatgatgtttacatacacgtttcactttgaaaaaaaatgcaaatcgactttttaacaactgttgagatgtttcatgggacagtagaactctgactcaccaactgggctaaattttaatttaaaaatgtatttatttgagtgtctttccccccctcaccctcaccatctgaggggctccctgagatcttggtagaggaggcccctcctgcccagaccttcgtttgtttccccggtggcccttgcttcttgctttgcagactgcctgcagccatgattttgtcactgacatctgtgagccaaagactgagcctttttggcaggaataataagcaatactacacaacttgctactttcagaaaacttttttttagcttcaccgatgacaacagaggaagaagggaactgggatttgggtaagttctcctccactgtttgaccaaattctcagtgataaatatgtgtgcagatccctagaagagaaaacgctgactttctttttaagtgtggcacataaggatctgcagaattttccgtagacaaagaaaggatcttgtgtatttttgtccatatccaatgttatatgaactaattgtattgttttatactgtgaccacaaatattatgcaatgcaccatttgttttttatttcattaaaggaagtttaattt

SEQ ID NO: 1574 - protein, 924 aa, Homo sapien
REESGAGARPRRRSADSGAAGAGRGGGGEAAGKEEEGESRSRRASMGRLASRPLLLALLSLALCRGRVVRVPTATLVRVVGTELVIPCNVSDYDGPSEQNFDWSFSSLGSSFVELASTWEVGFPAQLYQERLQRGEILLRRTANDAVELHIKNVQPSDQGHYKCSTPSTDATVQGNYEDTVQVKVLADSLHVGPSARPPPSLSLREGEPFELRCTAASASPLHTHLALLWEVHRGPARRSVLALTHEGRFHPGLGYEQRYHSGDVRLDTVGSDAYRLSVSRALSADQGSYRCIVSEWIAEQGNWQEIQEKAVEVATVVIQPSVLRAAVPKNVSVAEGKELDLTCNITTDRADDVRPEVTWSFSRMPDSTLPGSRVLARLDRDSLVHSSPHVALSHVDARSYHLLVRDVSKENSGYYYCHVSLWAPGHNRSWHKVAEAVSSPAGVGVTWLEPDYQVYLNASKVPGFADDPTELACRVVDTKSGEANVRFTVSWYYRMNRRSDNVVTSELLAVMDGDWTLKYGERSKQRAQDGDFIFSKEHTDTFNFRIQRTTEEDRGNYYCVVSAWTKQRNNSWVKSKDVFSKPVNIFWALEDSVLVVKARQPKPFFAAGNTFEMTCKVSSKNIKSPRYSVLIMAEKPVGDLSSPNETKYIISLDQDSVVKLENWTDASRVDGVVLEKVQEDEFRYRMYQTQVSDAGLYRCMVTAWSPVRGSLWREAATSLSNPIEIDFQTSGPIFNASVHSDTPSVIRGDLIKLFCIITVEGAALDPDDMAFDVSWFAVHSFGLDKAPVLLSSLDRKGIVTTSRRDWKSDLSLERVSVLEFLLQVHGSEDQDFGNYYCSVTPWVKSPTGSWQKEAEIHSKPVFITVKMDVLNAFKYPLLIGVGLSTVIGLLSCLIGYCSSHWCCKKEVQETRRERRRLMSMEMD

SEQ ID NO: 1575 - DNA, 2353 bp, Homo sapien
ggcacgagggacagctggaagagccgaacggataagagaagaggaggtgagaggagctgtacaccacaagaggcactgagggactcaggataacgggatgaagccgtcagtgcccccagaaacgaagcggccccggacgaatttctgagtcaccgtcgcgagaaagcgggctgagccgccattttgaagcctggcaaaccgaagcaagaaatgctgccgtgttggatctttgccagccttcgtgccgaatgggagcaggttggagggagggagagccaatatacactatgggctgattaagcccggttggctgccatgttgttaacgagcaccgatttcctctacttttgtcgaagaagtttattgtgggtcagggacgtcaggtcgcttgccttcgtttactgtggtcatgattgagcatatgaggacggccattattgttgggggcaaatggaaatgctctaggcggggccatttttcttaggggcaagctgtcgtcacccttgtcaactggttcggatgaagcccctgtggccgccatcttgatctcgggcggccccgataagggaggcggagtgtgcggagaggaggcggggcaactgcgcggacgtgacgcaaggcgccgccatgtcttttgagggcggtgacggcgccgggccggccatgctggctacgggcacggcgcggatggcgtcggggcgccccgaggagctgtgggaggccgtggtgggggccgctgagcgcttccgggcccggactggcacggagctggtgctgctgaccgcggccccgccgccaccaccccgcccgggcccctgtgcctatcctgcccatggtcgaggagccctggcggaggcagcgcgccgttgcctccacgacatcgcactggcccacagggctgccactgctgctcggcctcctgcgcccccaccagcaccacagccacccagtcccacacccagcccaccccggcctaccctggccagagaggacaacgaggaggacgaggatgagcccacagagacagagacctccggggagcagctgggcattagtgataatggagggctctttgtgatggatgaggacgccaccctccaggaccttccccccttctgtgagtcagaccccgagagtacagatgatggcagcctgagcgaggagacccccgccggcccccccacctgctcagtgcccccagcctcagccctacccacacagcagtacgccaagtccctgcctgtgtctgtgcccgtctggggcttcaaggagaagaggacagaggcgcggtcatcagatgaggagaatgggccgccctcttcgcccgacctggaccgcatcgcggcgagcatgcgcgcgctggtgctgcgagaggccgaggacacccaggtcttcggggacctgccacggccgcggcttaacaccagcgacttccagaagctgaagcggaaatattgaagtccagggagggagcgccccgggccgcgtccgccccgtcccacactacgcccccgccccactcccggggcctgctaatctgaggccgatccgggaccggcctccttgcgtctcccattcccaagattgtcccgcctctgccaatccccgccgtccttccagcccacgacctgccgcgccgaggagcggcatctgtcccgtttcccgattgggtctgtcgtctctctccgcctagcgacagattccttctattaagggattggctcgctgagttctaagctctaaatgggtcaactcctttgttttccgcctagcgacaagggatttgctcgcacggcattggctccatcccctagtcgctggacagctctttttttgattggctcaaatcctgtaaagggcttgaccagtctctacatagtcaccgtccgcttttcctgagttctccctcccaattggctccagcttcctgggggcgtggccaagccctcctcttcccagaattggcccggggccttcaatttacgttctttacactacggggactggggtcgtctttgcccacgtcccgacaacttgttccctgaccccctcagggatggccccaaactgtccctgcctctggcaccccctttcattggttccatccatccccacaacagcctgccaatcgaagcccgtccctgcatccaggatggtaccagctcccgcccctcgccccccacctccacaggtgccttaaagggccctcgtccacccaaggtggggggcaggggccctcactctccggccctggtgtgggggagagagtgaggggttgggggatcggcagttgggaggggcgctctgagattaaagagttttacctctgagataaaaaaaaaaaaaaaaaaaa

SEQ ID NO: 1576 - protein, 256 aa, Homo sapien
MASGRPEELWEAVVGAAERFRARTGTELVLLTAAPPPPPRPGPCAYPAHGRGALAEAARRCLHDIALAHRAATAARPPAPPPAPQPPSPTPSPPRPTLAREDNEEDEDEPTETETSGEQLGISDNGGLFVMDEDATLQDLPPFCESDPESTDDGSLSEETPAGPPTCSVPPASALPTQQYAKSLPVSVPVWGFKEKRTEARSSDEENGPPSSPDLDRIAASMRALVLREAEDTQVFGDLPRPRLNTSDFQKLKRKY

SEQ ID NO: 1577 - DNA, 4840 bp, Homo sapien
agacaatcgatatctgggggccttaaaatgacctcttggcaaattgaaggaagcgtttttgcgtttaatagtttcaatagggaccaatatcagtttggtttggggcatttgaaggctgagcgaccttagtttttctcagtgttctggtgggacgatattggttttcacatttaaagcaaaacttgaagaaactgcagttgctgtgtgcatttgggttttttcctggacactgtacagctgaaaccctcaagcatttggtggaacctctggtggttttagatggatgcaaacactgatgtcctcagagaaagtttattttggcactgattgggtggatttggtattttttccctctgattctctttgatatccttctttcacactgctgaaggcatgggagggaaatatgttttccctgccttaaagagggattacagtcatgaaaggctggagatacttgttggccccacataaagctgggaagaacagatgcagtttcagattaaaatctcgtcagagaagtttgatttgaagtaaacagccatccgagggaggtgacttttgtctacagaaaaagcaagaatgtggcagcctgcacagccccaatacacatcttccttggcaatgtgagctgaagccagcatgggcaagtccggcccagctctgagcgcttggccctgggaagccagcggcacccccagcccttcgggccctgttactgtcccctggcaggaaggctcacgcctgtgggcagccagggaatgtgtctgacctccaccctatgtcgggtgcttctgggacagcttcgtgactcagttgaaaacattctgactctcttcaagtttgcagttacatctgtggttcttggaagctgtcctagtgagtcagccttgggttaagcctgaggagaccaagctccaacacctttgtgcactcatgtacgtgaattcttgcttgcagtgaatgagacctgaacaaccctagtgggtgccatgtcctgcgtgtggcccaggcgtaccttttcttgtagattcacatgagaaacccgtcacctatccatgtgctctgagaggtggactgaggtctaatccctttctgtgccagattttctgtgggttggtcttagcacctaggagatgaatagagcatggagacacctgaacaatttagtgattctgcaaggcagtgatgatttaagggttcctattgtctcatctgtgttcaaaacaaaacaatcatgaagtctttgtgccactgcctgactgtcatcttctccagatcttgtttacagagtaataatgacgttaaacaggtatcagaaaggggaaaaagtttctaggccaagagctgctggtggattctcttgagcagaataacaagttgcttcctgctccagggactgccattagcttgtgaagtctctaggtgccttgttatttcctagtgaagttgcagaatccagggttttttccaggtttgtcttattttatcagcacccacgtccaggcccaacagcttggtaggctggtgaggtccacacacggccaggtctgggagataagggaggaagcagtggcctggaacaccccacctgtctgctatcagcactagacagctcaggctgtcttggaaacgtgtactttgttaactgccttcctgtcctcttgtctttgaaagctgtctcgcgttccacagtcagcttgagggcaagagtgggatgctggggacaggtctttcccgtcctgtgggtgagctcctggcatctggctcaggaacatgtgggtccagcaggtgactctgaagctggcttggctgccatctcagacaggacgcaggcctgacaccctcagcttttagctttgtaaacttccctggcgctttgtagaatcttgtgtttcttctcttctcagcagatatcattcaagtcacaagaactgtctggttgagaaagtaatttaaaatatttgaccttttatgtttcttttatttagaaactgtgagagaaaataccgtcaatatctgttaggtctagaaaaattttcttccgaaagtgaatgttctgtttaattcttcttcatgcaagtgagtggcattttgtacactctttagcttgaagcggagtgggtcctattgtattttcccttcttttgtctggaatatattctttttccatttggatacagtttttcaacctttgggatttttttttcctttctagtttttcctactccacaaacgtaacagtaaggaaaaaatcacccacaaacctgctgagtttgaatcactggcaacttgcctagaaaagttcagatgatgggtccttgaactgtgtatctatttcatagggtaagtttgttgtctatgtttgtttttttatgctgaggctttaattcaggtgacttgctatctagacacctggggtggcgtgttttctttgggatgcataatacacaaaggccagggagcctttggcttggacccccagggagctattgaaacttttaaagtttgagtttaggagtaagaacatatctcagaccaccttagtcagctttgctgatgggatttagggccaggtcagagtttcttttcataactgcctgaaaagagagatggtgtgaaacaagattctgataatggtttgtgtgagatttgatcatagtctaaaactatcacgtctgagttgccttaggatgacagtgctgacacccagtaggaagtatcccatttttatcaggaaagtcagtcacgcgtagggatggtgaggagacgcgtagggatggtgaggaggggagaggagggagacctgctggtgcccttgcaccagggtgaggcctgactcacgctgcttccccccacaggccctgctttgcttgcctgctttttccagaatcgattttgcaagcttcaagattctgttcccctcttcgcagaagtgaggaaggcaaatactcagggtttgaagggagacctggccggcctgagggctggcagatgtgagggcaggacacctgggatggactcgtaggctgacccaggcccaaagggggctgcctgttcccaactctttcactctgtaacccattttaaaatgagtttttgaatcttgcctcaaattgacctacttggataaaatcagtgcttttcctaacttgattttgtttgacgtggttccctctaagagaatggtaggaattgaaactatttgtatatgttgaaatttgtaggggttcaggaacccatggcagaaacactaaactatttatttacaagtatgactatttttttttcaaagtaggcaattctttgtatattttaaggcaaataatcacttcacctctggtgccttccatgcgtcgcataagcactcttgtcaatcatggaattggaaaaaaagatgtacatttagttaaacaagataacactatttttgtagcatgattttagattgtgtccttttaatattgttttcaacaatggtagttttgaggttttggccattttctctttacacttcgtatgtattttaaagaagaaaaaaaacaaaaaaaattccctggctattcctctttcctctctgctgctgcttctcctgcatcttgttcctgcttatttaaatagtctgagagtaagagtatatttctgtgaaataattataagtcagtataattgcatttggcattttttaaccacttgctcagtttggagccactgctcacctcaaacagtacaaagaaagtggttccatattttacaaacagaagagtagcatcagagccctgacctcctgtctttgggtgtaaaatggtgagaggccggtgtccggctccttcccctgtggtttgggctggtgaactgagcccaagtgtattctctggcctgggccccttccagaatcagtgcgagcgtcctgcagaggcatggccttcctgccactgcagagtgggaagcttcctgggggacctcagccagctccggggctctcatcttccactcggatctcagattggttcgttgtggatgctctggctaggctcggcggccttttccaggcttcaggcctgaacaaaacaggctgtttgctgtgaggagctagatgacaccaagacacagacacgtactcttcaccggctccttttgcttctccttcctgcaggacgtgagttatgtctggtcccaaaacccttgagtaaactagctgagccattgcaaatgaaggtacagatggattgaaacataaaattgtagcttttggtgtccttctgaagggtcagaatatgtaattatttgataaccaaggaagtcaagtcagatggctaagtagtaactttccaatatgatttctccgtggtacttcacctggtggcacttttggggggcaatgttaacaactatcacattttactcatcaagtctctttcatttcggcagtttaaagacacaactgtgggctttctgaggcgatgcccgttgggcaaacttaggtttatgtgtttggtttttcagctgacgtggaagccctgggtgggcgtcccctggctggcctggcttttgggttcaagtctgtatgtatggagtgggttggggccccaaagctttgctgctattgatttgtccccgacagcaggcaaagcctcacattgccctcaattttccccctttcatttgaaggaccagtttttcatggtacttgtcttgatctttttcatagtgttcaaatctgtatttttgtatgtagagggaaataattttctcaacactaatcgttaataactattgtattaaattgtcatgaaggaacttgtttaataaatggacgtgtaaggcggagatgtcatcg

SEQ ID NO: 1578 - protein, 42 aa, Homo sapien
RQSISGGLKMTSWQIEGSVFAFNSFNRDQYQFGLGHLKAERP

SEQ ID NO: 1579 - DNA, 5801 bp, Homo sapien
caggcaaggcttatctggtgaaaacttttttgctatgctcagagggtaccgagtagaaaattatgacccaaaagggaccattgctttgtggtcataattttctactcggtaccctctgagcatagcaaattatgaccacaaagcaatggtcccttttgggttccctgaatttttccgctgtgaccctgcaatctctccgagccttcatgcagcagcacagatttctaggggagaatttgtccgcatctcaggattagattatgtggacagtgccctcctgatggggagagacagggacaagcctttcaaacggaggttgaaatcagagtcggtggaaacatctctcttccgaaagcttcgaactgttaaaagtgagcacgaaactttcaagttcacgtctgagctggaggagagccgactggagaggggcattcgcccttggaattgtcagcgatgttttgcacattatgatgtccagagcattttgtttaatatcaacgaagccatggctacgagggctaatgtggggaaaaggaaaaacataaccactggggcatctgcagcatcccagactcagatgcctacgggccagacaggcaactgtgagtcccctttagggagcaaggaggacctcaactccaaagagaacctggatgccgatgagggtgatgggaaaagtaacgacctcgtccttagttgtccttactttagaaatgagactggaggggaaggcgacaggcggattgcgctctctcgagccaactcatcctctttcagttctggggaaagctgctctttcgaatcgtcactcagctctcactgcacaaatgcaggtgtctccgtcttggaagtgcccagagaaaaccagcctattcacagggagaaagtgaagcgctacatcatagaacacattgaccttggggcctattattaccgcaaattcttctatgggaaagagcaccaaaactactttggaatagatgaaaaccttggtccagtagcagtcagcatccggagagagaaggtggaagatgccaaggagaaagaaggatcccagttcaactacagggtggctttcaggacaagtgagcttacaacactgagaggagcaattttagaagatgctataccctctactgctaggcatggtaccgcacgaggactacctctcaaagaagttttggaatacgtcattccagagctgagcattcagtgtttgcgacaggcttccaactcacccaaggtctcagagcagctgctcaagcttgatgaacaagggctgagctttcagcacaagatcgggatcctttattgcaaagcaggccagagcacagaggaagagatgtataacaatgagacggcgggaccagcttttgaagaattccttgatcttctgggccagagagtccgactgaaaggatttagtaaatatcgagctcagctagacaataagactgattccacgggcacgcactctctctataccacatacaaagactacgaactcatgttccacgtgtcaaccctgcttccctacatgcccaacaacagacaacagctactgaggaaaaggcacataggaaatgacatcgtcaccatcgtcttccaggagcctggggcacttccttttactccaaaaagcatccggtctcactttcagcatgtctttgtcatagtcaaagtgcataatccatgtaccgaaaatgtgtgttatagtgttggagtttccagatcaaaagatgtgccaccatttggcccaccgattcccaaaggtgtaacttttccaaagtcagccgtgttccgggacttccttttagccaaagtaatcaatgcagaaaatgcagcccataaatcagaaaagtttcgagcaatggccactcgaacgaggcaggagtacttgaaagatctggcggagaactttgtcacaaccgccaccgtggatacctctgtgaagttcagcttcattacgctgggtgcgaagaaaaaggagaaggtaaagccaaggaaggatgcccacttgtttagcattggggccatcatgtggcacgtgatagcccgggacttcggccagtctgctgacattgaatgtcttctcgggatctccaatgagttcatcatgttgattgaaaaggattccaagaatgttgtattcaactgttcctgcagggatgtgattgggtggacatctggattagtgagtatcaaagtgttttacgaaagaggagaatgtgtcctcctgtcctcggtagacaactgtgctgaagacatcagggaaattgttcagcgattagtaatagtgacgagaggctgcgagactgtggaaatgaccctgaggaggaacgggctgggccagcttggcttccatgtgaattttgaaggaattgtcgcagatgtggaaccttttggctttgcctggaaggctggccttcgccaagggagccgcctcgtggagatctgcaaagtagccgtggccactctgacccacgagcagatgatcgacctgctccgtacttctgtgactgtgaaggtggtcatcatccagccccatgatgacggctcgccccgaagagggtgttcagagctctgccggatccctatggtggaatataaactcgacagcgagggcaccccctgcgagtataaaacccccttcaggaggaacactacgtggcaccgggtgcccactcctgccctgcagcccctctctagagcttcccccatccccggcacgcccgaccggctgccgtgccaacagctgctccagcaggcccaggctgccattcctcgaagcacctccttcgaccggaagctgcccgatggcacgagaagctcacccagcaaccagtcatcctccagcgaccctggacccggcgggagcggaccctggagaccacaagtgggctacgacgggtgccagtcccctctactgctcgaacaccagggctcaggccctttggaatgtgacggagccagggagagggaagacaccatggaagcaagcaggcacccggaaaccaaatggcatggcccaccttccaaagtcctgggttcctataaagaaagagctctgcagaaagatggaagttgcaaagattcccccaataagctttctcacattggggataaaagttgctccagtcactccagcagcaacacgctctccagcaacacctccagcaacagtgacgacaagcactttgggtctggcgacctgatggaccccgaattactggggctgacctacatcaaaggggcctccaccgacagtggcatcgacacggccccctgcatgcctgccaccatcctcggccctgtgcacctggcaggcagcaggtccctgatccacagccgggccgagcagtgggctgatgctgccgacgtctctgggcctgacgacgagccagccaagttatattctgtgcatggctacgcgtccgccatctccgccggcagtgctgcggaaggcagcatgggcgatctcagtgagatatcctctcattccagtggttctcaccattcaggaagcccttcagctcactgttcaaaaagtagtgggtctctggattcatccaaagtctacatcgtgtctcacagcagcggacaacaggttcccgggtccatgtccaagccctaccacagacaaggggcagtgaacaaatatgtcatcggctggaagaaatcggagggcagcccaccgcccgaggagcctgaagtgactgaatgtcccgggatgtatagtgagatggatgtcatgtccacagcaactcagcatcagacagtggtgggagatgctgttgcagagactcaacatgttctgtctaaagaagattttctgaaattgatgcttcctgacagccccttagtggaggaggggcgaagaaagttttcgttctatgggaacctgtctccaaggaggtcgctttaccgcacgctgtctgacgagagcatctgcagcaacaggagggggtcctcctttggcagttcccggagttccgtgcttgaccaggccctgcccaacgacattctgttcagcaccaccccaccctaccacagcacgctgcctccgcgggcccaccccgcacccagcatggggagcctgagaaatgagttctggttctccgatgggtccttatcagataagtccaagtgcgcagatcctggcctgatgcccctcccggacacagccacagggttagattggacccacctcgtggatgctgcacgggcatttgaaggtcttgactcagatgaagaactggggctgctctgtcaccacacgtcctatctagaccagagggtggcatccttctgcaccctgacagatatgcagcatgggcaggacctggaaggggcccaagagctgcccttatgtgtagatccaggcagtggcaaagagttcatggacacaactggggagcgttctccatcaccactgaccgggaaagtcaatcagctggaattaattcttcgacaactccagaccgaccttcggaaggaaaaacaagacaaggccgttctccaagcagaagtgcagcacctgagacaggacaacatgagactgcaggaggagtcccagaccgcgacagctcagctgcggaaattcacagaatggtttttcaccaccatcgacaaaaaatcttagccaatccgcacctcatcaagggaccactgggaaatgccccttgtccctttgaagtcacaaacatgtggtttttctgtgtgctttcaaccaatcgtagatgtttttgctgttccattctgtgtagcaccattcaccacagcaggatagggagcctcgactctttctcggtaaccacggcagagagcagcgccgatgtgaagatgaatgaatgtaactcctggtgtgaagatgaatgtaaaccctggcgacagttgagacctttttcttttagactctgctaaaacagtgctctggcttgggcttacctcaagagggaagatagttgagttttatttcctgtatatcaggtgacctggtagagatgtaaagcaatttaccatagtttgggctttagtattgtaaaataaacatgagaacaaataatcagacatatactttaatgttaaaggtgctctatttttttggatgtacagtagttttatttccacagccacattaccatagcaataagaaaggaggcatagtacatagttggaaaagctttgtggggggattaaaaaaaaaaaaaagcactgttgtgtttaacactagttcagatgcagttaccttagagacttatttatttgcaggaacaaatggtgcctgaatattaacagtgttctgattaaaaacaaaaaaaagatacatatgccttgtaaatggctcaccgagtggtcagtagtcacttcaactcttagttcacttttgtatagttgctctgctggaaagaaatgagagtgaatctgcttactcactagaacttccctgtgtgctgtgagccagcggaaccacttgtacaatgccagatttgtttatctttgtacagaagctttgatgaagtgtcttgtatttaacacccttatttaagcttatttaaccttaaattgttaattttataaaatttggtttggcctgcactacgatgagggatggaggtagctgcaggctcagaagagactgagcttgcacagatcagaccgagaagcagggtgagagattctaacgactggatgctgctagtaacacattgtttgtattgctttaccatttttaactgttagatttgagatgaacatacattttgcttttttaataaatgtttaaaagaagtccacataag

SEQ ID NO: 1580 - protein, 1514 aa, Homo sapien
FSTRYPLSIANYDHKAMVPFGFPEFFRCDPAISPSLHAAAQISRGEFVRISGLDYVDSALLMGRDRDKPFKRRLKSESVETSLFRKLRTVKSEHETFKFTSELEESRLERGIRPWNCQRCFAHYDVQSILFNINEAMATRANVGKRKNITTGASAASQTQMPTGQTGNCESPLGSKEDLNSKENLDADEGDGKSNDLVLSCPYFRNETGGEGDRRIALSRANSSSFSSGESCSFESSLSSHCTNAGVSVLEVPRENQPIHREKVKRYIIEHIDLGAYYYRKFFYGKEHQNYFGIDENLGPVAVSIRREKVEDAKEKEGSQFNYRVAFRTSELTTLRGAILEDAIPSTARHGTARGLPLKEVLEYVIPELSIQCLRQASNSPKVSEQLLKLDEQGLSFQHKIGILYCKAGQSTEEEMYNNETAGPAFEEFLDLLGQRVRLKGFSKYRAQLDNKTDSTGTHSLYTTYKDYELMFHVSTLLPYMPNNRQQLLRKRHIGNDIVTIVFQEPGALPFTPKSIRSHFQHVFVIVKVHNPCTENVCYSVGVSRSKDVPPFGPPIPKGVTFPKSAVFRDFLLAKVINAENAAHKSEKFRAMATRTRQEYLKDLAENFVTTATVDTSVKFSFITLGAKKKEKVKPRKDAHLFSIGAIMWHVIARDFGQSADIECLLGISNEFIMLIEKDSKNVVFNCSCRDVIGWTSGLVSIKVFYERGECVLLSSVDNCAEDIREIVQRLVIVTRGCETVEMTLRRNGLGQLGFHVNFEGIVADVEPFGFAWKAGLRQGSRLVEICKVAVATLTHEQMIDLLRTSVTVKVVIIQPHDDGSPRRGCSELCRIPMVEYKLDSEGTPCEYKTPFRRNTTWHRVPTPALQPLSRASPIPGTPDRLPCQQLLQQAQAAIPRSTSFDRKLPDGTRSSPSNQSSSSDPGPGGSGPWRPQVGYDGCQSPLLLEHQGSGPLECDGAREREDTMEASRHPETKWHGPPSKVLGSYKERALQKDGSCKDSPNKLSHIGDKSCSSHSSSNTLSSNTSSNSDDKHFGSGDLMDPELLGLTYIKGASTDSGIDTAPCMPATILGPVHLAGSRSLIHSRAEQWADAADVSGPDDEPAKLYSVHGYASAISAGSAAEGSMGDLSEISSHSSGSHHSGSPSAHCSKSSGSLDSSKVYIVSHSSGQQVPGSMSKPYHRQGAVNKYVIGWKKSEGSPPPEEPEVTECPGMYSEMDVMSTATQHQTVVGDAVAETQHVLSKEDFLKLMLPDSPLVEEGRRKFSFYGNLSPRRSLYRTLSDESICSNRRGSSFGSSRSSVLDQALPNDILFSTTPPYHSTLPPRAHPAPSMGSLRNEFWFSDGSLSDKSKCADPGLMPLPDTATGLDWTHLVDAARAFEGLDSDEELGLLCHHTSYLDQRVASFCTLTDMQHGQDLEGAQELPLCVDPGSGKEFMDTTGERSPSPLTGKVNQLELILRQLQTDLRKEKQDKAVLQAEVQHLRQDNMRLQEESQTATAQLRKFTEWFFTTIDKKS

SEQ ID NO: 1581 - DNA, 1108 bp, Homo sapien
gggagcctaggagccccccgcggctgcggcgcaggtgccctcggcctgagtcgggatggagctgcctgctgtgaacctgaaggtgattctcctaggtcactggctgctgacaacctggggctgcattgtattctcaggctcctatgcctgggccaacttcaccatcctggccttgggcgtgtgggctgtggctcagcgggactccatcgacgccataagcatgtttctgggtggcttgctggccaccatcttcctggacatcgtgcacatcagcatcttctacccgcgggtcagcctcacggacacgggccgctttggcgtgggcatggccatcctcagcttgctgctcaagccgctctcctgctgcttcgtctaccacatgtaccgggagcgcgggggtgagctcctggtccacactggtttccttgggtcttctcaggaccgtagtgcctaccagacgattgactcagcagaggcgcccgcagatccctttgcagtcccagagggcaggagtcaagatgcccgagggtcctgaagccagccacgctgcgcccggccctgccccgggccttcctcgtgcctgggaggtcgttctagggatgctcctgacctccgtctcttggacctaagatggaatgtgtccccagctcagggattgcctgaaccaagaggccaggagcccccatgggccgcccagtaccatgcacactcctgtcccgaactccctgaggcctcccctcccttcagggcacccactggttcccaggctggaaccagggtctctctttacctcctaccccatggtggcaccacagaggccctcagccgagtccagcctgagtgttgcaagctcaggcctttaaggactgctgatgccccctcaggcctcccccaagtttgctgggctttggtggaagccctgagagcttcaggtcctgctcagcccgaggagcagtctggcatgggagtgaggccccgtccttctcactgcctggtcacatggtgcctagggatgcagggctggaggccagaggtgtcagcaacactgtgacccaccacaacctccagcctcccttttcagagcacagcattaaagtttggggaattc

SEQ ID NO: 1582 - protein, 159 aa, Homo sapien
MELPAVNLKVILLGHWLLTTWGCIVFSGSYAWANFTILALGVWAVAQRDSIDAISMFLGGLLATIFLDIVHISIFYPRVSLTDTGRFGVGMAILSLLLKPLSCCFVYHMYRERGGELLVHTGFLGSSQDRSAYQTIDSAEAPADPFAVPEGRSQDARGS

SEQ ID NO: 1583 - DNA, 4456 bp, Homo sapien
ggccgcgcggcgccgcgccggccgagagggggccggatcccggaccatggcggcggcggggggcgccgaggggcggcgcgcggccctggaggcggcggcggcggcagctcctgagcggggaggcgggagctgcgtgctgtgctgcggagacctggaggccacggcgctgggccgctgcgaccacccggtgtgctaccgctgctctaccaagatgcgggtgctctgcgagcagcgctactgcgccgtgtgccgcgaggagctgcgccaggtggtctttgggaagaagcttcctgcctttgccaccatccccatccaccagctgcagcatgagaagaaatatgatatctactttgcagatggaaaggtgtacgcattgtacaggtgagcagggcctctccctgggtcctggcctccctgtggttgtggcccttcacgtcccactctcctcacaaccggaggcacttcgggggccacctggtgcaccaatgctggggccaggcacctgggtttccatcctgtgactggggaggcttaccaggccctcctgggggtagagctggtggttgtgctggggaaaggcatgcccaggtggtgcagcacctgcctcgggggcaccttgaggggcacacgaggtgtgtgagccaggcccgtggcctgaaaatcctataaagggtacagctgtcccagggctggtctctcagaggaggggcagctcatgggctcagggctagagccaggcttctgacccaggccatgtgcacagccatggccttgcatctgtcctgggtcacgggcctggggcctggtgagtggccctgctcccggcggtgacactgaatgtcctggggccgtgggcggctctcggtgtcttcctaggcagctgctgcagcacgagtgcccgcggtgccccgagctgccacctttcagcctcttcggggacctggagcagcacatgcggaggcagcatgagctcttctgctgccgtctgtgcctccagcacctccaggtgtgcccccccagcgaccccggagagagcctaggcggtgggtggtgcaagggatgtggccacacggctgggaggggcttgtccacctgctgcttctggccccggatggccccctgagggtcaggctgcacgtggcagggaggcctctggctgctggcggggccctctcccgccccttgctgctccgccactggcctgtgggaagaggcaggaggcttggggtcccccagcctgtgcccagcctcctgtgccttgtagatcttcacatatgagcgcaagtggtactcgcgcaaggacctggcccggcatcgcatgcagggtgaccccgatgacacgtcgcaccgtgggcacccgctctgcaagttctgtgacgagcgctacctggacaatgatgagctgcttaagcacctgcgccgcgaccactacttctgccacttctgcgactcggacggggcccaggactactacagcgactatgcctacctgcgtgagcacttccgggagaagcactttctgtgtgaggaaggccgctgcagcacggagcagttcacccacgccttccgcaccgagatcgacctcaaggcccacaggacggcctgccacagtcgcagccgcgccgaggcacgccagaaccgccacatcgacctgcagttcagctacgcgccacggcactcgcgccggaacgagggggtcgttggtggcgaagactacgaggaggtggacaggtacagccgccagggccgagtggcccgggctggcactcgcggagcccagcagagccgccgaggaagctggaggtacaaaagggaagaagaggaccgagaagtagcagctgctgtccgggcctccgtggccgcacagcagcaggaggaggctcgcaggagtgaggatcaggaggaaggcggtaggcccaagaaggaggaggcagcggcgcggggacctgaggatccccgtggcccccggcgctcaccccggactcagggcgaaggcccaggccccaaggaaacctcgacaaatggtcctgtaagccaagaagccttctcggtgacaggcccagccgccccagggtgtgtgggggtgccagggtgagagtatgggcgcccaggggtgaatggtgcatggtgggcgggtgcgggcagccacaggtgggtgccgggagggcaggtatggagccacggggcctgatagctgttgaccagctgtgcttccctgcacccagcgccctcccaccacccagcccgaagctcaaggacgaagacttccccagcctctctgcctccacttactcctcctgctccactgcagcaaccccgggccctgtggggttggcgctgccgtacgccatccctgccagaggcaggagtgccttccaggaggaggacttccccgccctggtgtcctcggtgcccaagcctggcaccgcccccaccagccttgtctctgcctggaacagcagcagtagcagcaagaaggtagcacagcccccactctcggcgcaggctaccggcagcggccagcccaccaggaaggctgggaaggggagcaggggcggcaggaagggcggcccgcccttcacacaggaggaggaggaggaggacggcggcccggccctgcaggagcttctgagcacgcgccccacgggctccgtctcctccacactggggctggcctccatccaaccctctaaagttgggaagaagaagaaagtgggctcggagaagccaggcaccacattgccacagcccccgcccactacctgtcccccaggggctttgcaggccccggaagctcctgccagcagagccgaggggccagttgccgtcgtcgttaatggacacacggagggcccggcccctgctcggagtgcccccaaggaaccccctgggctcccaaggcccctggggtccttcccctgccccacgccacaggaggacttcccagcgctcggcggcccctgcccaccccggatgccgccgcccccaggcttcagcgctgtggtgctcctgaagggcacgcctcccccacccccgccgggcctggtgcccccaatcagcaagccgccccctggcttctctggccttctgcctagcccccacccggcctgtgtccccagccccgccaccaccaccaccacaaaagcgtaagtgtgggtgagctgcctggtgtccaccgggggtggaggaacggtaccctccccttgggccactgtgaaggctgaagcctccacctcctctttaccttctgacccccagacccaggctgctgcctgccccacgggcctacctagtccccgagaacttccgggagagaaaccttcagctcatccagtccatcagggacttcctgcagagcgacgaggcccgcttcagcgagttcaagagccactcaggggagttcagacaggtcaggcgggcccggggagtccagatgggtcaggcgggcccggggcggggtgccagcccgtcttcatccagggcccgggccagaggggatgactgagtccggctctccggtggcagggcctgatctccgcagcccagtattacaagagttgccgggacctgctgggggagaatttccagaaggtctttaatgagctgctggtcctgctgcccgacacggccaagcagcaggagctcctgtctgcacacacggacttctgcaaccgcgagaagcctctgagcaccaagtccaagaagaacaagaagagcgcgtggcaggccaccacccagcaggcgggcctggactgccgtgtgtgccccacctgccagcaggtgctcgcgcatggcgatgccagcagccaccaggcgctgcatgctgcccgggacgacgacttcccctccctgcaagccatcgccaggatcatcacgtagctcccgccagcgtggccagagctgtcgcaccgtgagcgtccttcctccttcctctccgggctgccaggcagccaggtaaggcctggtgaggccacttggcctcttggttggccaggcccaccaggaagtcaccaggacagtccacccgccctgttggcacactcaagcgggagtccacccctgcctcagtggtgggccagtctcggtttgcattcttgtgcttttgggaggtgccaggggagggaagggctgggatgctgggacctgttgttgctggcaaagccagaggtcacagtggcctgatctgggccctcccaaagctgagggctgcagcccgtggggcctcagagctgaaagctgcggcgccactggtgccagagtcagatgtcacagatgtgttgtgtaaacagttggctgtttcgtgcttcaagaatgttcaggattaaaagcagacaagaaattgtgctacttgaagttgaatctttttatgagacaagctgaatctgggatctcaaattgcctctgaccttttataagacagtttatcttcaaataaatttattttgcaataccacgc

SEQ ID NO: 1584 - DNA, 1400 bp, Homo sapien
gggggtgggtccggcgggtccccgggcggggcggggccggggcgaggggtgccgggtggtttccgcccggcagcccgcagcccgctgcgccccgggccgcgtctcccggcggtgggagggggcggcccccactcggttcctggcccctcgcggccccgtcagcctcccgctcggggtgcgccgcccttcgtctgggtctccgcccccaggacccgcggccgagagctccggagcgcggcttccccggccggctgcgcgatgggctgcgggaactccaccgccaccagcgcgggcgcgggccaaggccctgcaggagcagccaaagatgtaacagaagaatccgtaacagaagatgacaagaggagaaactatggaggagtatatgttggcctaccatctgaagctgtcaatatggtgtccagtcaaacaaagacggttcggaaaaattagaagaaaataacatcatgactcaagaatcaagagcttgctcatcagtttggaaggaatttggctccgtgggacgttgtaatgtgcacagacatttccaaggaaattctaaacagtcacccttcccttttgcattcccccaaatcttaagtgtatacataaaaccctgggtacatattgttgtggtaatagaagggaattggttaaacagtacacttgtttatggaactttctgtggccacctacgaaagacaagttaacaaactgtcatggaggctgttgttgcccagccagggccgctgcattttgacaacatttccaccctggccactcagcacatttcatggaggtcatgtcttttcactgatacttttttgatagtttttatataacaaaatccttattctatttataacttaagatgataaggcactataaattaatgacctaaaataatatatttgtctgttatcttttgctatttctacttcactttaatttttagctgtaaaattggtaaatggattcttacaactatctctttccatttcttactatttggttttcaaatttcatttaaatgtcagaatttccttttttaggaacaatgtgtatttcattgcactatttaaaaataaactcaaatttgcatgccatatgcacattttgattacatttttattttctttcgtgaaaggcatgtgcaactacaaatacttcatagctgtttgggttgctcattctacatcacgacaatctcatcatattatttctataacttttcaaggacttgcgatggatggttagtgggatatctggaaattaatttgataatgacttgtgtatctacttagtattgcaatgtaagttactcaattcaccaatgtatttcaacaattaaaacatttttatccctcttcaagaaaaaaaaaaaaaaaaaaaaaaaaaaaaaa

SEQ ID NO: 1585 - protein, 63 aa, Homo sapien
MGCGNSTATSAGAGQGPAGAAKDVTEESVTEDDKRRNYGGVYVGLPSEAVNMVSSQTKTVRKN

SEQ ID NO: 1586 - DNA, 5034 bp, Homo sapien
agcggccgccaacgccgcccggactggagccctgacattgctgcgctcggggggctccaggcagcccgtatcggggcctttatttctcgtcggcggcgccctgcaccgcgcctcgcaaagccaaacaccagagcaccctagaaggtttaactaaaagaatgctcatgtttgacccagttcctgtcaagcaagaggccatggaccctgtctcagtgtcatacccatctaattacatggaatccatgaagcctaacaagtatggggtcatctactccacaccattgcctgagaagttctttcagaccccagaaggtctgtcgcacggaatacagatggagccagtggacctcacggtgaacaagcggagttcacccccttcggctgggaattcgccctcctctctgaagttcccgtcctcacaccggagagcctcgcctgggttgagcatgccttcttccagcccaccgataaaaaaatactcacccccttctccaggcgtgcagcccttcggcgtgccgctgtccatgccaccagtgatggcagctgccctctcgcggcatggaatacggagcccggggatcctgcccgtcatccagccggtggtggtgcagcccgtcccctttatgtacacaagtcacctccagcagcctctcatggtctccttatcggaggagatggaaaattccagtagtagcatgcaagtacctgtaattgaatcatatgagaagcctatatcacagaaaaaaattaaaatagaacctgggatcgaaccacagaggacagattattatcctgaagaaatgtcaccccccttaatgaactcagtgtcccccccgcaagcattgttgcaagagaatcacccttcggtcatcgtgcagcctgggaagagacctttacctgtggaatccccggatactcaaaggaagcggaggatacacagatgtgattatgatggatgcaacaaagtgtacactaaaagctcccacttgaaagcacacagaagaacacacacaggagaaaaaccctacaaatgtacatgggaagggtgcacatggaagtttgctcggtctgatgaactaacaagacatttccgaaaacatactggaatcaaacctttccagtgcccggactgtgaccgcagcttctcccgttctgaccatcttgccctccataggaaacgccacatgctagtctgattgcctctgtgtcctgcctcagcgtgactccccactcacctggctctctctctgtcctgcctcccattatctaacacattttttacatgtacattttaatttgattcagctggtctgaatctctgaatttatatcatccaaaacttccatatggtcagtagtagatgttctctaatcctccctctccttaccacgggtcagacctaaagaatgtgaacacttttttttttttttctggggatgctaagcaaacccttcttacagatacgtttaatgtaataagaacaagggaacatgtaaactaacataaccaattgtcagttctccatgtattcctcaaaagaatgtcagagtaaatgtattagaaatacagtatccagactgctagtccttgccagagacattcttacctctgccctgtgataatattttatgcttgacagtgaaaacaagtgtggccccttgcaccggttagctagaagtacagccagatttcaagctagtgcagtcacctcttccgtcattcttcacaaatcttgtcaacctggatcttagacttcatctgaatcgagttctttgccctcctttgtgcctgcagctcatatggaggtctttgccaccaatgggagatgagcccaaactttcgatctaggtgggtgatgtgtagcagttcaagggaagggtgctgtgttttcatagcatggagtcggaggagagggccatttagcagggggagcagaagaggcaattcctcctgggctaggggttgtcaatgaggtttcaacattttgttagctgtgtgcagcattcccagagcttcagtctctgtgcatactcagctttgtagaaccatgctgcaaagccatataccgatggggttatccatgcaactatctccattcctacaatgtccttaatatgagatcatcaaacattgatagtagggactccatggaatatttgcccagtaatggtaagaaatctttcgggtaagagtatggatggttcttcttttacccaatctgcttatagctttttttgtaaacagggaaatgttgagtggtacttgtattcccttatcaaattaatcacatagcttttatacagaaactcttcctgtgtgagctgttaaggtgccaaattggctgtcatttgtattcatgacacataccataaagcatctgctaatgctttaatggattgattcaattaagacctgagtgacactatttgtaaatataactagttgtgaagcacacatacctttattttgggaatttatgagaaaatatagaaaaccacagatcagggattcatatatgtagctcaaaaattcccaaaagtttactgttagagttggcaatttcctatcactatttcagtgtcagaacaaactgaaaataatggctcgtgtttatgttgaagataaatagcaccattattgggggaagttattcaaaagcaggcttttgagcaccatagtctaaatgccaataaaaataattcatacatagaaatgtcattggtcctgaatttgaagaaagtgagcaacagtagttaaatgtgggtgcatataaccaaattccccttcatcaagaatggaggagaagagagaagaatgaaatcctgaagattcatcccagccgcaactcaggatccaacacaactttaactgggaggaatacattgtttgatcatttttaaaacatctgtgaatgagtgattccggaggcctgtgaattgtgtggggagcttgctttgatggcactgtgttaataaaagttgtagggactgtgcacctaagaggctaagaggtcccactcatccgccctgtgaaccagctgtaaagaaatgtagttaagaaatgcaaagaaatgtgttatcttggcacttgggtttgattttcctttttttaaagcactgcaaaacttctttaggatactaaaacatcctaattgggctgtttttttgttttgttttgtttttcagctaaaggcaaagataatttttttttcagctgaagtttttcttttttgcaactatgacatgaattgagtgataaaatggctctttgaaaagtagatattgtctgtattgtaaatgcttagtcatattcatggcaaagtgttcatttcttgagatggttctttcacaacacacaagaatcaagatggaacgcaaggaaaatctttttgttttgaccgaggtaaccagtttatgtgtgttccaatccatagagaagtgggggaaagggcgagaaaggatcagattgatctgggatcagctttgagcctgagttcagtgaatagcctcatgggcatctcatggaattgatgcatttgctgtggcatatttaaattttgttcaaaagatttgaagcaagaccttgcaaagactcttaacattactgttcagcttgcttagattgtgttaacagttcatttaacaaagatccgttttaactctgaacaaaagcaacccagagcggccattctctattcccatgctggtcaatacgctttcattaccaattggcccttaccaaacttttcttatatatatatttgtattttactatgatagttgagaaatttagcctcttagtcatttttagctgttattgtggaagacctcaaatacaagattagatgcccttgaacatgttttaatgatgtgtgtcatgttactatcaatggtgatttcaatcgcaatattttaaattgatgagaatgatttgtaaacatgaagttactattacgtaaattctgtttgttatagagtttcttcagttgttacccaagtgtcatcctagagaagtcagaagaatcagaatccatcgtattttagagttatgtgaatctacatcataaatgggcattaacattctaaattgcttggtttggagaatgtgttagcagcatagctatattcaactagggagatgctaaatacacagaagtttcaagagccttggaacagaattacaggggaactatatatgtatatgtatattttattaaacacccatctgcactatcagtattgcactaatgtggaatttgaaagactattttgctgatactgtatatatgcgcatcattcctgattagattgttgtaaagacaatctgaaagatctaaggttttaaaataatttggtttgaaaatatacagttgtcttgaaggaattgctgtcatacatgaagttgctccgagctgtctttattctcttcttggtcaaggttaacaattgctaaatgatcgcaaattcacctaaacaatacatttacaaagccatctttacatgcattaaacgagggctacaacaatattgttttacaaatactagcacttttttttctgttatgtacttagtgttagagggtcaaaataatctttctgcttagcatctcttaaaccatacctgcaaatatagcaggattattacatttacagtactttaatacttgtataaactatgcagaaatttttaataaagtgtaatatattttataagctaataagactgaatgggtaaaggtttttagcatgcgttagtatacttgcagatactgaaacattttggtaatctttcttactaaagatgtgaatgtttaatgtaccttctctgtttctactctgtagtccaatgggaattcagtaatgacattttgtcatgtcaaactgtgaacataaatttgtactgtacagtcctcatatactatatacagtatgcaatatatattatatacttgttaataaaaccatcagaatattaaaaaaaatctatgtcgggtgcggagaaagaggtaatgaaatggcaggaattcgatatcagc

SEQ ID NO: 1587 - protein, 345 aa, Homo sapien
MLMFDPVPVKQEAMDPVSVSYPSNYMESMKPNKYGVIYSTPLPEKFFQTPEGLSHGIQMEPVDLTVNKRSSPPSAGNSPSSLKFPSSHRRASPGLSMPSSSPPIKKYSPPSPGVQPFGVPLSMPPVMAAALSRHGIRSPGILPVIQPVVVQPVPFMYTSHLQQPLMVSLSEEMENSSSSMQVPVIESYEKPISQKKIKIEPGIEPQRTDYYPEEMSPPLMNSVSPPQALLQENHPSVIVQPGKRPLPVESPDTQRKRRIHRCDYDGCNKVYTKSSHLKAHRRTHTGEKPYKCTWEGCTWKFARSDELTRHFRKHTGIKPFQCPDCDRSFSRSDHLALHRKRHMLV

SEQ ID NO: 1588 - DNA, 6816 bp, Homo sapien
gaacgctcacagaacaggcagtgcaattccatgttcctcttaagtatgttagccctaccgggagctgagctggccagtctacttggagaggaaaagtagatctggggaaggtggaagggtcagttcctaagtgacttcctcctcggggatggtaagggcatttgctgatctccagtgactgcctggtgcctcatggtcagactcggctgtctcactcccagatatctgattttgcaaaaagggacacacctatctgcagcaaagaagacactgaccagattgcgagcggtgcttttggatgctctgtagccacccggggcccaggaggactgactcggcagcaggattcgtgcatgggaatcggagaccatggcagtgcagctggtgcccgactcagctctcggcctgctgatgatgacggagggccgccgatgtcaagtacatcttcttgatgacaggaagctggaactcctagtacagcccaagctgttggccaaggagcttcttgaccttgtggcttctcacttcaatctgaaggaaaaggagtactttggaatagcattcacagatgaaacgggacacttaaactggcttcagctagatcgaagagtattggaacatgacttccctaaaaagtcaggacccgtggttttatacttttgtgtcaggttctatatagaaagcatttcatacctgaaggataatgctaccattgagcttttctttctgaacgcgaagtcctgcatctacaaggagcttattgacgttgacagcgaagtggtgtttgaattagcttcctatattttacaggaggcaaagggagatttttctagcaatgaagttgtgaggagtgacttgaagaagctgccagcccttcccacccaagccctgaaggagcacccttccctggcctactgtgaagacagagtcattgagcactacaagaaactgaacggtcagacaagaggtcaagcaatcgtaaactacatgagcatcgtggagtctctcccaacctacggggttcactattatgcagtgaaggacaagcagggcataccatggtggctgggcctgagctacaaagggatcttccagtatgactaccatgataaagtgaagccaagaaagatattccaatggagacagttggaaaacctgtacttcagagaaaagaagttttccgtggaagttcatgacccacgcagggcttcagtgacaaggaggacgtttgggcacagcggcattgcagtgcacacgtggtatgcatgtccggcattgatcaagtccatctgggctatggccataagccaacaccagttctatctggacagaaagcagagtaagtccaaaatccatgcagcacgcagcctgagtgagatcgccatcgacctgaccgagacggggacgctgaagacctcgaagctggccaacatgggtagcaaggggaagatcatcagcggcagcagcggcagcctgctgtcttcaggttctcaggaatcagatagctcgcagtcggccaagaaggacatgctggctgccttgaagtccaggcaggaagctctggaggaaaccctgcgtcagaggctggaggaactgaagaagctgtgtctccgagaagctgagctcacgggcaagctgccagtagaatatcccctggatccaggggaggaaccacccattgttcggagaagaataggaacagccttcaaactggatgaacagaaaatcctgcccaaaggagaggaagctgagctggaacgcctggaacgagagtttgccattcagtcccagattacggaggccgcccgccgcctagccagtgaccccaacgtcagcaaaaaactgaagaaacaaaggaaaacctcgtatctgaatgcactgaagaaactgcaggagattgaaaatgcaatcaatgagaaccgcatcaagtctgggaagaaacccacccagagggcttcgctgatcatagacgatggaaacattgccagtgaagacagctccctctcagatgcccttgttcttgaggatgaagactctcaggttaccagcacaatatcccccctacattctcctcacaagggactccctcctcggccaccgtcgcacaacaggcctcctcctccccagtccctggagggactccgacagatgcactatcaccgcaacgactatgacaagtcacccatcaagcccaaaatgtggagtgagtcctctttagatgaaccctatgagaaggtcaagaagcgctcctctcacagccattccagcagccacaagcgcttccccagcacaggaagctgtgcggaagccggcggaggaagcaactccttgcagaacagccccatccgcggcctcccgcactggaactcccagtccagcatgccgtccacgccagacctgcgggtccggagtccccactacgtccattccacgaggtcggtggacatcagccccacccgactgcacagcctcgcactgcactttaggcaccggagctccagcctggagtcccagggcaagctcctgggctcggaaaacgacaccgggagccccgacttctacaccccgcggactcgtagcagcaacggctcagaccccatggacgactgctcgtcgtgcaccagccactcgagctcggagcactactacccggcgcagatgaacgccaactactccacgctggccgaggactcgccgtccaaggcgcgccagaggcagaggcagcggcagcgggcggcgggcgcactgggctcagccagctcgggcagcatgcccaacctggcggcgcgcgggggtgcggggggcgcggggggcgcggggggcggtgtgtacctgcacagccagagccagcccagctcgcagtaccgcatcaaggagtacccgctgtacatcgagggcggcgccacgcccgtggtggtgcgcagcctggagagcgaccaggagtgccactacagcgtcaaggctcagttcaagacgtccaactcctacacggcgggcggcctgttcaaggagagctggcgcggcggcggcggcgacgagggcgacacgggccgcctgacgccgtcgcgatcgcagatcctgcggactccgtcgctgggccgcgagggcgcccacgacaagggcgcgggccgtgccgccgtctcagacgagctgcgccagtggtaccagcgttccaccgcctcgcacaaggagcacagccgcctgtcgcacaccagctccacctcctcggacagcggctcgcagtacagcacctcctcccagagcaccttcgtggcgcacagcagggtcaccaggatgccccagatgtgcaaggccacgtcagctgccttacctcaaagccagagaagctcgacaccgtcaagtgaaattggagccacccccccaagcagcccccaccacatcctaacctggcagactggagaagcaacagaaaactcacccattctggatgggtctgagtctccacctcaccaaagtactgatgaatagaggagctacaatgatagctgtttcctggattcctccctctatccagaactagctgatgtccagtggtacgggcaggaaaaagccaagcccgggaccctcgtgtgagccagcccggcctaatctgaccgcctcaacgccattctgagatcacctcactgcctctcatttgccttacccagacgcaccgtcaccctgcaccagctttggccctcagcactttttttctcctgtctccgcattccctcccccttgaaaacctgactgaggagacattctggaaggttccggtcccactgtgtgtcccctggcgctcttgcccatagagagccagacaccaatcctcaatggcaccttggtggcttccctctgccatgacagcccctaggccaggaaccatcaggggggccagccggcatccaattcctgcggataagtagcgttgggagagaacgggaaaggggacttgggttacagggtgacccagaaagacgattcagctgtgtccagcctgccacccatacgtaggccaaccaagcacttcatgaagaggaggcctcgtggcatattcagtttacacctgaaatattccttgatgggacagcttgtggggatggctatgggggaaggggaggttgagaaaggaagttctcgacaccagaaatgcatcggaggaccacaatcagttctatgctgccaaagattaaaaataaataaaaacataaaaaattaagaggggccaagaggaagacattctttctgcaaggaaatttcttttaaattctgaactgctactacacacaagtgaaagtcaaccctatgtaaactggtgtcctctctctagccctctcccttactggcccacttctctctccgtagagagcctgaaaaactgccccaatgccacggtaaaggcgaggaagtcttggctggcgttgctgactcacagtcgccatccatctggacacaaagagagacctgtgggagtcatagagggtactgttagccccggtccatgcagggggttcagccgagcccaagactcaaagctgctttcctttcaggatttgtagtaacgtaaggtgataatggccaaaagtggttctctctcattaaaccaaccagtaaaagcgtatcctatttttttgcataaggtgtttcattttcgtttttatgggaaaccaagggaaaagcacattgcgatccattcagtgtttaactgtcgtggctcattttctgttcgttagcacttgtgtgacaaaagagctcagatccgacttctcctatgtgtcacttattccaagaacccaactatgcccttaggtagaaagatttgactcgtgtgtctactagccaacaggcagagcagggttgaaaaaaatatcagctcccaaagggcccatgtgtctacatcatcagttactgtcatgcaccacatttgtgtgcagataccaaaagaggaggaaagaagaaaaaaattaatgtgtgggagctgcacgtttacatgttttgagctatgcttcaaacacaactggaaagccatcaatcttcaaaggcctcaaaaatacttttatagtaacaagtgcacgactttagttgggttattcaagatggcacaaaaaggtttccgcagaggtggtatgctgtgcttttggcgcaagtggtggggggatgggggtgggggtggaatttttttctcactctaatgacttcctattggaaaggcattgacagccagggacaggagccagggtgggggtagttttgtgggaaagcagaactgaagttagcttaagcataaaaacaaagaaaaatcttcgcttttcatgtatgtggaatccaagaataaccataggctctaccagaccaggagggtaaggatggacactaaaatgaaacaaataccaaggtattccttctgctgcagcctggagaccaccgagagtcgagctggggcacacacacacctggccgggacccggcagggacaaggcgggccgtggcctcctccaccaagtctctctagacaattcagggcctgctttccccagctccatgcatggctggactggtgattccagggtgcagaagggattcatattcccagaacgctttaagtgtacacctgcaggataaagagataccggttacattattaaatgattctagggattcactgggggatatttttgttgcttttactttcatggttagagctacaaagaacagtgattttttttttttctcccttccccattcagaaacattatacattgggccatttttctttctcccaaagaagattcatggatagtcagactgaactgtgtgcaacaggaaaagtcaaaagggaaaaggcagctgatgaggttacatggttacatgttctacatcatgcagagtagcttgaaatctagtctggagaaaactggatcaagattctagcccactggagttgcaaggaatgagaggcaaaaattctaaagatttgggttatattttcaacttgggggacagagagaaatggagagcaggaattacagttccaacaaacatcatgatagtctggtagtcaagacagagattaagtaaaacaggttttactgtttagctgagttcagttaatacaaaatgtacataaaacgttagtcctttgagactgacatgattaatgatcagtgtggtgggaaatgatgtagttattgtacacaagcacttgcaaactctttatccctatttctttaaaacaaaataaggtgaaatacgaagtccttggtctgatataaagcccctattggattcttcggatgcgtaaaagaaattgcctgtttcagccagaagactggtgaaaacacatacatcagactatgttgtgagccaggttgattttttattttattatatgcaggtgagtgttgaaactgttaaaattccaatttgttttcattcagtattagtttagttctaaatatagcaaaccccatccaggtgctatcagatgaccagttactgcttagttaactaggtgtaaagttttacatatacattaatttcaatagtttattacaagttgtgtaaaatggactctagtttaataatgggggaaaaaagattaggttgctcctgaaactgactgtagagcatgtaaaatgattttactggattctgttcaactgtaatcaatgaaaaagatgtacgttgtagacaaagttgcagaattaaaaaaagaaatctgcttttaatttattctttttgtattaagaatttgtatagtatctttacattttgcaaaacagtgttgtcaacacttattaaagcattttcaaaatg

SEQ ID NO: 1589 - DNA, 2832 bp, Homo sapien
cttccgcttcctgtaccaccctgctcaagtagcggacacggaacagggaactatcagcccgtcggcctccgggccctgcattctctagccatggaccgggaccttttgcggcagtcgctaaattgccacgggtcgtctttgctctctctacttcggagcgaacagcaggacaatccacacttccgtagcctcctggggtcggccgccgagccagcccggggcccgccgccccagcacccgttgcagggcagaaaagagaagagagttgacaacatcgagatacagaaattcatctccaaaaaagcggatctgctttttgcactttcctggaaatcagatgcacctgcaacttctgaaattaatgaagacagtgaagatcattatgcaatcatgccacctttagagcaattcatggagatacctagtatggatcggagagagctgtttttccgagatattgagcgtggtgatatagtgattggaagaattagttctattcgggaattcggttttttcatggtgttgatctgtttaggaagtggtatcatgagagatatagcccacttagaaatcacagctctttgtcccttaagagatgtgccttctcacagtaaccatggggatcctttatcatattaccaaactggtgacatcattcgagctggaatcaaggatattgacagataccatgaaaagctagcagtatctctgtatagctcttctcttccaccacacctatctggtattaaattaggtgtaattagctctgaagagcttcctttatactacaggagaagtgttgagctaaatagcaattctttggagtcctatgaaaatgtcatgcagagttccttgggatttgttaatccaggagtagttgaattccttctagaaaaactaggaatagatgaatctaatccaccatctttaatgagaggcctacaaagcaaaaatttctctgaagatgattttgcttctgcattgagaaaaaaacaatccgcatcttgggctttaaaatgtgtgaagatcggagttgactattttaaagttggacgccatgtggatgctatgaatgaatacaataaagctttggaaatagacaaacaaaacgtggaagctttggtagctcgtggagcattatatgcgacaaaaggaagtttgaacaaagcaatagaagattttgagcttgcattagaaaactgtccaactcacagaaatgcaagaaaatacctctgccagacacttgtagagagaggaggacagttagaagaagaagaaaagtttttaaatgctgaaagttactataagaaagccttggctttggatgagacttttaaagatgcagaggatgctttgcagaaacttcataaatatatgcagaaatctttggaattaagagaaaaacaagctgaaaaggaagaaaagcagaaaacaaagaaaatagaaacaagtgcagaaaagttgcgtaagctcttaaaagaagagaagaggctaaagaagaaaagaagaaaatcaacttcttcttcaagtgtttcttctgctgatgaatcagtgtcttcatcatcatcctcttcctcttctggtcacaaaaggcataagaaacataagaggaaccgttcagagtcttctcgcagttccagaaggcattcatctagggcatcctcaaatcagatagatcagaataggaaagatgagtgctacccagttccagctaatacttcagcatcttttcttaaccataaacaagaagtggagaaactactggggaagcaggataggttacagtatgaaaagacacagataaaagagaaagatagatgccctctctcttcatcttcacttgaaataccggatgattttggaggtaggtctgaagatccaagagatttttataacagctataaaacccaagcaggtagtagcaaaacagaaaagccatataaatcagaaagacatttttccagtagaagaaattcctcagattccttctgtaggaattcagaggacaagatttatggttataggagatttgaaaaggatatagagggaagaaaagagcactatagaaggtgggaaccaggttctgtgaggcattctacctcaccagcaagctcagaatactcttggaagtcagttgagaaatacaaaaaatacgctcactctggatcacgtgatttcagtagacatgagcaaagataccgtttaaatacaaatcaaggagaatatgaaagagaggacaattatggggaggatatcaaaacagaggttccagaagaagatgcactaagtagcaaagaacactcagaaagcagtgttaagaaaaatttacctcagaatttactgaatatatttaatcagatagctgaatttgaaaaagaaaaaggaaataagtcaaaaaattaatacaccaaggatatcggcaccattacacaaaatgccattaagtgaagtttttggttgtattagtcataacagttgagtgcagaaatctctgcttctaaaattatttgtagagattacaggaaacaaatgcttttaagtaagtttctctcaaattttgtttcagttctaggtcccttgtcacagcttggtttttagactttttatgtatatgtttatgtacagtatattactcttgacagtttgaatttcttcacctaaagataattctctgaaagtactgtttcttcattctattgcggtatatgagaattcctgggtgcatcttattctgctgtttgagagaaaaatttgtgcattgaacacttggatcatttttataaaaattaatttcattttcttttctgttaaattaaaaatcgtcagcttttg

SEQ ID NO: 1590 - protein, 770 aa, Homo sapien
MDRDLLRQSLNCHGSSLLSLLRSEQQDNPHFRSLLGSAAEPARGPPPQHPLQGRKEKRVDNIEIQKFISKKADLLFALSWKSDAPATSEINEDSEDHYAIMPPLEQFMEIPSMDRRELFFRDIERGDIVIGRISSIREFGFFMVLICLGSGIMRDIAHLEITALCPLRDVPSHSNHGDPLSYYQTGDIIRAGIKDIDRYHEKLAVSLYSSSLPPHLSGIKLGVISSEELPLYYRRSVELNSNSLESYENVMQSSLGFVNPGVVEFLLEKLGIDESNPPSLMRGLQSKNFSEDDFASALRKKQSASWALKCVKIGVDYFKVGRHVDAMNEYNKALEIDKQNVEALVARGALYATKGSLNKAIEDFELALENCPTHRNARKYLCQTLVERGGQLEEEEKFLNAESYYKKALALDETFKDAEDALQKLHKYMQKSLELREKQAEKEEKQKTKKIETSAEKLRKLLKEEKRLKKKRRKSTSSSSVSSADESVSSSSSSSSSGHKRHKKHKRNRSESSRSSRRHSSRASSNQIDQNRKDECYPVPANTSASFLNHKQEVEKLLGKQDRLQYEKTQIKEKDRCPLSSSSLEIPDDFGGRSEDPRDFYNSYKTQAGSSKTEKPYKSERHFSSRRNSSDSFCRNSEDKIYGYRRFEKDIEGRKEHYRRWEPGSVRHSTSPASSEYSWKSVEKYKKYAHSGSRDFSRHEQRYRLNTNQGEYEREDNYGEDIKTEVPEEDALSSKEHSESSVKKNLPQNLLNIFNQIAEFEKEKGNKSKN

SEQ ID NO: 1591 - DNA, 558 bp, Homo sapien
ggcacgaggccttcggccacccccgctgaccatggcagtgtttcatgacgaggtggaaatcgaggacttccaatatgacgaggactcggagacgtatttctatccctgcccatgtggagataacttctccatcaccaaggaagatttggagaatggggaagacgtggcaacgtgtcctagctgctctctcattataaaagtgatttatgacaaagatcagtttgtgtgtggagaaacagtcccagccccttcagccaacaaagaattagttaaatgctgaagaagccttcaggaatccaaatcctgaacatttggaatgagcccagatagaaatatcgaatgcaaagctactggcttcacagagacaaccatttatgatttgctgttctgtaagagtgtggattctttctatcaactgctgatatcatcttcaggaagcaagtccataacatgacatatctggattttgtgcttagaaccttaaattggaagcattcttaattatgcatctaaatttaaaagaagataatttcaaaacagtaaaaaaaaaaaaaaaaa

SEQ ID NO: 1592 - protein, 82 aa, Homo sapien
MAVFHDEVEIEDFQYDEDSETYFYPCPCGDNFSITKEDLENGEDVATCPSCSLIIKVIYDKDQFVCGETVPAPSANKELVKC

SEQ ID NO: 1593 - DNA, 1608 bp, Homo sapien
aggacccgggttgcgggagaccccaggttcggttgggattcccagccagaacggagcttaagccgggcaggcgagcgaatgacggagtagcgagctgcacggcggcgtgctgcgctgttgaggacgctgtcccgcgcgctcccaggccgccccgaggcttggggtcttcgaaggataatcggcgcccggggccgaacagcgggggcacacggggcgctgccgaagtgcaaggccacggccagagctcgagcccgacgcgctgtctggagtcgtaggttggcgccgtttggggtcggggtctgaggcttgggcgctgcctgggccgagcggagatcggggtttgcctcccgtccccgctcaggaccctgacgtggctgaagcggccccgggagcatgagcgggcagcgcgtggacgtcaaggtggtgatgctgggcaaggagtacgtgggcaagactagcctggtggagcgctacgtgcacgaccgctttctggtggggccttatcagaacgtgagtgcatccggaggggccaggcacggtgggcgggggagtggggggccggtaatctgcacctatggccccgatctcctccctctcgttgcagaccatcggggccgccttcgtggccaaggtgatgtcggtcggagaccggactgtgacattaggtatttgggacacagcaggctctgagcgctatgaggccatgagtagaatctactatcggggtgccaaggctgccatcgtctgctatgacctcacagacagcagcagctttgagcgagcaaagttctgggtgaaggaactgcgcagcctagaggagggctgccaaatctacttatgtggcaccaagagtgacctgctggaagaagaccggaggcgtcgacgtgtggacttccacgacgtccaggactatgcagacagtagctgctcctcagccctttggggggtgggggtgtgtggctgtctgggtggatcaaagaaaatagggactgccttggctgccagggcaaggtgctctaggaggtcttcctggcctccttgaactgtggggtccaggagactccctgaactgctagccctcccttttgtctgtttatctaattctcaggtatgaggctttagtcacttctctttacagatatcaaagctcagctctttgaaacatccagcaagacaggccagagtgtggacgagctcttccagaaagtggcagaggattacgtcagtgtggctgccttccaggtgatgacagaggacaagggcgtggatctgggccagaagccaaacccctacttctacagctgttgtcatcactgagtcagcactcacctggcctgggggaattaaaggaattccccgtaagggctggacccagctcctttctgggcttgggtagtcaaatgtctgagctaccccaggtcctcatgtcagcagagtggcgcctgcctgtgctggcccatggaacggagacagcattgggctgactgtgggcatgaggagggataaggctgatttggaccccaggcttctgccctggacagcacttgtgtctgcagattatttaagtggcttttgatctgtaaataaaatcagtgcactgtgaatcac

SEQ ID NO: 1594 - protein, 155 aa, Homo sapien
MAPISSLSLQTIGAAFVAKVMSVGDRTVTLGIWDTAGSERYEAMSRIYYRGAKAAIVCYDLTDSSSFERAKFWVKELRSLEEGCQIYLCGTKSDLLEEDRRRRRVDFHDVQDYADSSCSSALWGVGVCGCLGGSKKIGTALAARARCSRRSSWPP

SEQ ID NO: 1595 - DNA, 2502 bp, Homo sapien
aacgctgggcagggccggcgcgggtcggggggcgcccgaggggcccgggccgagcggcggcgcgcagggcggcagcatccactcgggccgcatcgccgcggtgcacaacgtgccgctgagcgtgctcatccggccgctgccgtccgtgttggaccccgccaaggtgcagagcctcgtggacacgatccgggaggacccagacagcgtgccccccatcgatgtcctctggatcaaaggggcccagggaggtgactacttctactcctttgggggctgccaccgctacgcggcctaccagcaactgcagcgagagaccatccccgccaagcttgtccagtccactctctcagacctaagggtgtacctgggagcatccacaccagacttgcagtagcagcctccttggcacctgctgccaccttcaagagcccagaagacacacctggcctccagcaggctgggccatgcagaagggatagcaggggtgcattctctttgcacctggcgagagggtctgactctgggcacccctctcaccggctacaaggccttggactcactgtacagtgtgggagccccagttcccacctctgtgacaataggatcatggccttacccttgaagcattaccgagaaggagaacagagatgggcttgaagagccacgtgctgccggctccaaattcccaaggacaaggatccctctgcatttttgtctatgtaacctcttatatggactacattcagctgcaaggaaaggaaaaccttgattgcagtggtttaaacaaacagaagattgtttttccacatagcatggattctggagatgggtggctaatggtattggttcaacaactccacggaggtaggggtcacgtcttggatccttttgccttaatctcagtgctcgttacttcatggtcccaagatggctgctgtatccccaagaatcatgtctgcgttcaaggaaggaggggtggaggaagaggaagggccaaactagctggacccgtcaccttctatcagaaagtaaaacctcgtcagaagtctgtttcctgctctctccctctgcatatcttcacttagatgcccttggcccgagccagctaccattgcacctctagctgcaaacaaagctaagacagcagggaacagaattgtcatggctgaatagaccaatcgtgttccatctactgagactggcacactgcctcctgcaataaaactgggatcccattaccaagagagaaatgcagaattgtgtaccagttagcttttgctgtgtaacaaaccatccccaaacttggcagctagaaacaaaccctgtattttcccacaatcctatgggttggcaatttgggctgggctcaacagggcagttctgctgctcacacctgggatccctcatggagctaaggtcagctgttacctcagctgggcctggatggtctaggatagccttactcacttgcctggcaggtgacaggctgttggctggaattgcttggttctcctccatgtggcctctccagcaggctagctcaggcttattcacatgatggcttcaggattccaaagagagtgagagtagaagctgaaagacttcttgagttcttggcctggaactgggactaggacagtgtcacttctgctaagttcttttggtcagagcaaatcacaaggctttacccagattcaagggatgagaaacagactacatgtcttgatgaggggaaccacaaagagcttgtggccatttttcacctatcacaaataattttggatgggtatttatttggataaaggtatttccctcttccccctttctctctgtctcatggggcctcactctgccaagttggaaggcactaagacattgtcctggccctcagggtctaggggaagaggtgttggggcaggaagtgagtctctccatgggctggacccactgtagtaggagtgcctccttgtctgcactgctggtatggggttaggccaggtaggacattccagaggggcttctgaaaaccaagagtccctggggaaagggaacagagtaaggcaggccttgttctcactgccctctaagggaacttggtcactcggcacttttaagcctcagtttctccagttcaataataaggacaagagcttttcccatgcattctctttccccgggaaagttgactgaggtgaccagtaatagaattgaaaagggagagtgtcttcagtgcaatgtggcatcctggattgggtcttggaacaaaaacaggacattagtgggaaaattggaaatctgaaaaaagtctgaattttagttaatataccaatttcagtctcttggttttgacagatgtaccatggtgatgtaagatgttgaccttggggtaggctgggtgaagggtatacaggaactctttgtactatctctgcaacttctctgtaaatctagtatcattccaaaataaaagtttatttaatttaaaaaaaaaaaaaaaaaaaa

SEQ ID NO: 1596 - DNA, 2000 bp, Homo sapien
tcccagcttttcaaaagtttattttaagtttggagactagacaaggtcatactggttttacatcctacgtgatataagtatatatacaaagaaaaaaacaacattggaatattacacagcttgaaggtttgcaaaggttatttgtgtcttagttatttctgcacttaatgacacatcagacgcattgagtatatttcataagttgttgactagcaaagatacaatcattagtaacccaagtcttcaaaattcacaccaaactttatgaagtcattcagaaagagaaagtcaatcctaaaattaaaattggcaactatgataaataccttcaaaaggatgtagatataatggagatgtttaaaagtttagtttcattaattgtaaaattagcatgttatatttactcaatatagtgaagactagggggattcttacatgtattctacttatgggactgtactgggtttaggggggaatttacatagaataaatttacttcactttcatggtcatcgacatgaatgacacaaaagctacttcataatactactttacaatagttttcaacatttccatatggtgcgacccctttgctctcatcaattttgggtgtcatgagaacaataggtatcccgttggacatgatgtattgcgaagagcatataaagcagagggaaaatgaaaaagcaagagaaactcatttcaatgctttttctaaaaggtaacaaatataattttaatcaacttccttggaaaatatttttaaaacaggtatcaatagaaaaaattacaaaacatcatatgaagctataaataattttgaaaaactatatcatcataaagcgtaagtaataatcttaaaaatacactcttaagaaggtatgtaatttgcaaaggaaaatggctagatatctgatgggacagtaaaccttgaaagaaactggctaaagagtaagtgtgtgtatatttctgaacctaagtaattatttgtcacgactttaaaatttagccagttacaaatattttaaaatcctaactttaaagttatctaaaaaaggcaatatggaggaaatagtaattttgtttttgaaagatgttgaaaactgatcaccatttcagaggcttcaaattcataatttcataataagaacaagaagtagaaagcatatgggcaaggaacaaatatgtggccagccagtccccttagacgaactaattttgttcttattaaaaatgccaatacaattgactttctctttaaattcttcactatgattgaagaccactccatatatacatcattaagaaatgctgttaacacatggacagacaagacagtaacagtctagtggcttttgttatgcagcacaaatattaaaggaaaaaaatagcagtgttgcgtaggatcttaacatttcatacacataccatcctttcttttccaatacacttaatttaaaactccaataattctgtctaagccttataaaataaatacttgtaaagcttataaattagatgttgaagacttttatggaggcagtgtgagctttaatttgagagacatgtcaatgaaacctccagtatcaataacaaattgttatgataattgcttattttttcaggacctttgaagcaaaataaatagaaatcagttttcatcttgaaaatggtttactactttgtcattagtaaacactttgcttctcacaaataactccacctgtgccttcctgggaaactaccaccagtttcaaatctcaataagatgttagtttcacaggaaatgtggagctgaacaaagaaatgatgagtatgcttggccgaactatgcagcactatattaatatttctttgctaaatttttataaaataaacaaataagccgattttttaaagtaaatataaggatatgtaattaccatctaaatgaagatttaaatttaaagagacatatatattttttgttcttttgtgcaaactgagagtatgggattctt

SEQ ID NO: 1597 - protein, 158 aa, Homo sapien
MDEDGDESIHKLKEKAKKRKGRGFGSEEGSRARMREDYDSVEQDGDEPGPQRSVEGWILFVTGVHEEATEEDIHDKFAEYGEIKNIHLNLDRRTGYLKGYTLVEYETYKEAQAAMEGLNGQDLMGQPISVDWCFVRGPPKGKRRGGRRRSRSPDRRRR

SEQ ID NO: 1598 - DNA, 1496 bp, Homo sapien
ggcacgaggcttcaggtcaaacccttaagacatctgaagctgcaacctggcctttggtgttgaaataggaaggtttaaggagaatctaagcattttagacttttttttataaatagacttattttcctttgtaatgtattggccttttagtgagtaaggctgggcagagggtgcttacaaccttgactccctttctccctggacttgatctgctgtttcagaggctaggttgtttctgtgggtgccttatcagggctgggatacttctgattctggcttccttcctgccccaccctcccgaccccagtccccctgatcctgctagaggcatgtctccttgcgtgtctaaaggtccctcatcctgtttgttttaggaatcctggtctcaggacctcatggaagaagagggggagagagttacaggttggacatgatgcacactatggggccccagcgacgtgtctggttgagctcagggaatatggttcttagccagtttcttggtgatatccagtggcacttgtaatggcgtcttcattcagttcatgcagggcaaaggcttactgataaacttgagtctgccctcgtatgagggtgtatacctggcctccctctgaggctggtgactcctccctgctggggccccacaggtgaggcagaacagctagagggcctccccgcctgcccgccttggctggctagcttgcctctcctgtgcgtatgggaacacctagcacgtgctggatgggctgcctctgactcagaggcatggccggatttggcaactcaaaaccaccttgcctcagctgatcagagtttctgtggaattctgtttgttaaatcaaattagctggtctctgaattaagggggagacgaccttctctaagatgaacagggttcgccccagtcctcctgcctggagacagttgatgtgtcatgcagagctcttacttctccagcaacactcttcagtacataataagcttaactgataaacagaatatttagaaaggtgagacttgggcttaccattgggtttaaatcatagggacctagggcgagggttcagggcttctctggagcagatattgtcaagttcatggccttaggtagcatgtatctggtcttaactctgattgtagcaaaagttctgagaggagctgagccctgttgtggcccattaaagaacagggtcctcaggccctgcccgcttcctgtccactgccccctccccatccccagcccagccgagggaatcccgtgggttgcttacctacctataaggtggtttataagctgctgtcctggccactgcattcaaattccaatgtgtacttcatagtgtaaaaatttatattattgtgaggttttttgtctttttttttttttttttttggtatattgctgtatctactttaacttccagaaataaacgttatataggaaccgtcaaaaaaaaaaaaaaaaaaaaaaaaaaaaaaaaaaaaaaaaaaaa

SEQ ID NO: 1599 - protein, 27 aa, Homo sapien
MGPQRRVWLSSGNMVLSQFLGDIQWHL

SEQ ID NO: 1600 - DNA, 4574 bp, Homo sapien
ccaaaacaaaacttttctttacttaagccgtcccagaggaagtcctgctgcagaaaagatgatagaattggtcacccaatcaatagctgtgaagacttccttattcctgctgaacttccttccttggatatcttcatggataagcctgtgtctgtggacagagtggggcccaagtgctgaggctcgaaagacaggttttacaatcagccaattaaacatcttaccagttgctgtaccccttgccaaggggatgagctgaggagcttcttttctttaggtccaacatcaaaatgagtccatctgagctagggctttttgcaaaggtgattaaaaatcaaggctggagttccagccaaatagggaggagaggtaccacaagttcatcttaaacttgcttccgggctgggtagttaaaacaggaagatcccaaggggatcttacgaggcaaatatcagcaggtaactgtggaagaaaggaaatctcaggacctaatgagttcgttgtaaaatattcctgggaatagatgggggatctactcccagttttttactttttacagaatattgttgctttcctacaacaatgtacatatatttgcagttgtatatgctttttttttttccaaataaacttgtcaccctgcatgcccttggcaaataagtgaagcagaaataggaacacagtccacattcaagttgaggaacagtgtatctttaagagctgacctttgggtgacctggaaagggggaaagatggctaagcatggagagaaacgaggcaagagacaagctatgatacaacaccgcttcagcccctgccctcaatagcacacaacccacatatcagctttctgaagagaaggaacctactgtttagtgctcctcactttgcaatgtttgtgctacgccagaatttctccagtttttttcattatcatccccctgagaaaaaaattacattgaatttaaattttccctaataagagaaattaaatatgaaagaataggattttgttgggtaagattgagctttggaaggtcacgaaccattattctatctaaggtgtgtgttttgttttgtttttttttgtttttttttggcaatccctctccccctgaaccaatttcacattgggaatgcaggacctagactgctgaataaaaagctacttcttctataattgtcaggttctctccaatttctcagcttcctcaaagacatggggtggagttgggtgtgccatcactgagagagctctggaacttttgactcttagtgacatttttagatttaggggttcatggccttccacatgttgccaccaactggtgatctctgccccttcatgctgatcaagaaagtagaaactcctcgtcgccttcaggtttgcagtcgcagaaacattgcctgctgtggactgtcagcacaaaactgggacactggtgtcatttagactgtcagcagtgcacatgattgtacgatagactccaggcaaccatgtgcatctgtgcaagatgacctctgccccaagagaagggttacggtctaattaaatgtttaccaagatggtaccagtgggctctccccgtgtcctttggtgttattggagctggtgtatgacagactcaaggaaattttttaaggaaaatgaagaagaaatcaacctttatggttctctttcattggaagaggagaataaggaaagaaatggcaggtagagagggagggggaaaggaatagaaatggcatgtctttgatgctgtggcttgtgtggggacaatgggaagagcacagcaggcacaacatatctgtgttagtgccacgtggtatctgttaagtatggccagagcctcacatataagtgaagagagttaagacaattcttgctctttgaacaataatagtctatagaatttctattggcaaaccatcccagacaacctgacctatcaaacaaaagcaaataatccctgtctcagaactgctggtctaaaagctagaaggggcatgataatggaaattgctagaaaagagagaatgctctactctctttcctgtgcctacctacccccatcctaaaccctgtaaaacagaatttcaaaatagatgtcaaatatgaagtaattcagacttccaaagaaggaaagagttctgcccagggcagtatgagcaaatccacagggatgttaagatttggtccaactcaaaggtttatgggcagtgagcctagagtctcttgagagtaaacccttgcatttgggacaaggagaatatgtgaagttcaggagtgctcacactagagcaagatccagaaaaaaaaaaatccaatggcattttaaactagattgcattatcactcaatgctgttactttgagcagacaaatcagttgaatgggagggcaaatggcagaaatgaacaaaagctattaggtgaaagcatccccaatgtatcagttgtgagatgatttttgtttaatgatgatcaggtttacattgaagtggcttggaagacgtatttcagagggactgggtttgtactgcaaaactctgaacactagagcaggttctactagcacttgggcagtaaggtagcgggtgtgtattatgctattgccatagttctcgtctttgtggattcacataccctttcccatgaggagcttgctactaacagcctcctgtttctgttgtttttatatgggagaagagaaagagcttggaatttcaattgtctaaacaattggtatgatttacaagaaggcaaaccattcaggagatgttcaacagtgtatcattcttagcattcaatacaatgtttattataaaatatacacctgagtttatgtttttctgccaggctgaagggcaataatgtcttgctatgcaaacactctattttatgtgtgaatttttttaactgtaattttatgtgtgaatttttttaactaaactctatcatcattttctatgttgacatctttttttttttttaatctgtttccaactctgagtctgtgaactatctcttctgactggatgctggcctaaaatcctattagtgcttaaacagacctcaaaacactctgaacctgtaggccaatacagagatgttgttctttgatatatcttgggtccttgatggcttcaacaaacaaggtcataatttgtttaaattcagtgttttctgtagataccttcttctcagtttcattaagaagagtaaccatctttggttttccaaagaatggaaactcctaccctagactttagacttagagcgtctgcctttcacgatgagtaagagatccagaatgtttaggggatgtgcgtcagcccacctggtacagtggcaaagctgaatgcgaacttgaggcctcctgaggcctgaccttctatgcccccagccctccaccccaagcaccttttggtgtggctggaaacacatgacattggatgtgatttttctcaagcccttcactgtggaaggcatgggagactgcccagcattgggcatgtggctgttaacgtttccatttcaagtccctgattcttactggagaagttaaggagccacttaatgttttcacagacctctgattctgttgtgaatgtggcattccagtgagtacaacctgcttgctataaagaaagcagcatattttgacaattttatttcttccttgggtacttacatttttattacaaaaatggccgttataaaaaaagacagaagggctgggcagtggcttgctccctagaaactgagattccgaagcaggtgtttcctctcccctagactcagaggtacatttaatccatcttctccatttcctccttcaggaccagctatgagattcagtgcatttctagcccagcggatgttcattctccactaaacttcatcttttactaagcaaagggggattattccatgaggcagccaggagcaaggggccatgatattcatgactttgtctgctgggcatttttcaaagtgtccttgaattcactcagcaaacaaagctttctggagaatctctcaaaacttaggccctgctccatttggccaaaaatgatggctgctccaaaactctgaacttcttaaaactccatctgctacattatttctggagtttaaacatgactttttctgtctttgagtatagatgtgtttgtttaattaacgaagcacaagtctgttaagcagaaggctccaagctgtattctatacttgggaatccttggtgccatctttattctaccaagtgccaatcaccatggctaaagtgggcgtatattacagcctgtgtcctaagcttagaagctttaatgtacttttttaaatgaaaagtattagagggggttgaacattgtaactaaagcataaagttagaccaattacatgcagagatgtttatttaatattgtgtgagctgagtccttctgtataaattatttgcacacttttcttgcatgatgaactgattttttatagttgtttgtaccagacggtggcatatttttgtaaaaaacttttgacactgaattgcaataaatgtttttccaacaacac

SEQ ID NO: 1601 - protein, 85 aa, Homo sapien [sequence omitted]

SEQ ID NO: 1602 - DNA, 793 bp, Homo sapien
gggtaacagcgagactctgtcgttaaaaagtaataacaataataatagataataaagacttacttaaccaatattattgattaccagacttttatgaaagccaaagactgcttgctagtaggaaaaaatttcaaataataaccaaagctgaaaaatggtctgtcataaattatttccccggtaatttttgaaaggaaaaatgtataacaagtactatttacatatctgcatttaaaaaagcaattcttagaatacttcctttacattattctcctattttagacattttgtgaaagagaacaaattgtccagtggcctcctgtcagatcaacaattattatactccttaattccatgcaaatttaaatgaatgctataaaattttaaatctgtagcctgggtgtacgtttcactcaagttctcctactgaggactcttgactaacagcatactggcagtttcaccttaacctgctcgttaaataatgtgttggtgtgagatatcaggaatgtctcatgatatcacgtttaccatttacaccatctgcaaccatatgctattaataaaatggaaaaaaacaaaatggtcattttgcatatacttcactctgacctagtttagtccatgatactataattgtgagagcatatccagatgctgtgttctctatgtaaaacagtattgtccattcagaaatgtgtgacccttcatttatggatattgactatatgtaatgcagtgctatcccaatattttcaataaaggactttatgcattcagtgattttctttca

SEQ ID NO: 1603 - protein, 19 aa, Homo sapien
MQCYPNIFNKGLYAFSDFL

SEQ ID NO: 1604 - DNA, 3217 bp, Homo sapien
ggcagatctcaccgcctgcttccctctgcagcggtagcacaagctcagcgatggcggctccagaaggcagcggtctaggcgaggacgcccggctggaccaggagaccgcccagtggctgcgctgggacaagaattccttaactttggaggcagtgaaacgactaatagcagaaggtaataaagaagaactacgaaaatgttttggggcccgaatggagtttgggacagctggcctccgagctgctatgggacctggaatttctcgtatgaatgacttgaccatcatccagactacacagggcattttgcagatacctggaaaaacaattcagtgacttaaagcagaaaggcatcgtgatcagttttgacgcccgagctcatccatccagtgggggtagcagcagaaggtttgcccgacttgctgcaaccacatttatcagtcaggggattcctgtgtacctcttttctgatataacgccaaccccctttgtgcccttcacagtatcacatttgaaactttgtgctggaatcatgataactgcatctcacaatccaaagcaggataatggttataaggtctattgggataatggagctcagatcatttctcctcacgataaagggatttctcaagctattgaagaaaatctagaaccgtggcctcaagcttgggacgattctttaattgatagcagtccacttctccacaatccgagtgcttccatcaataatgactactttgaagaccttaaaaagtactgtttccacaggagcgtgaacagggagacaaaggtgaagtttgtgcacacctctgtccatggggtgggtcatagctttgtgcagtcagctttcaaggcttttgaccttgttcctcctgaggctgttcctgaacagaaagatccggatcctgagtttccaacagtgaaatacccgaatcccgaagaggggaaaggtgtcttgactttgtcttttgctttggctgacaaaaccaaggccagaattgttttagctaacgacccggatgctgatagacttgctgtggcagaaaagcaagacagtggtgaatggagggtgttttcaggcaatgagttgggggccctcctgggctggtggctttttacatcttggaaagagaagaaccaggatcgcagtgctctcaaagacacgtacatgttgtccagcaccgtctcctccaaaatcttgcgggccattgccttaaaggaaggttttcattttgaggaaacattaactggctttaagtggatgggaaacagagccaaacagctaatagaccaggggaaaactgttttatttgcatttgaagaagctattggatacatgtgctgcccttttgttctggacaaagatggagtcagtgccgctgtcataagtgcagagttggctagcttcctagcaaccaagaatttgtctttgtctcagcaactaaaggccatttatgtggagtatggctaccatattactaaagcttcctattttatctgccatgatcaagaaaccattaagaaattatttgaaaacctcagaaactacgatggaaaaaataattatccaaaagcttgtggcaaatttgaaatttctgccattagggaccttacaactggctatgatgatagccaacctgataaaaaagctgttcttcccactagtaaaagcagccaaatgatcaccttcacctttgctaatggaggcgtggccaccatgcgcaccagtgggacagagcccaaaatcaagtactatgcagagctgtgtgccccacctgggaacagtgatcctgagcagctgaagaaggaactgaatgaactggtcagtgctattgaagaacattttttccagccacagaagtacaatctgcagccaaaagcagactaaaatagtccagccttgggtatacttgcatttacctacaattaagctgggtttaacttgttaagcaatatttttaagggccaaatgattcaaaacatcacaggtatttatgtgttttacaaagacctacattcctcattgtttcatgtttgacctttaaggtgaaaaaagaaaatggccaaacccaacaaactaacattcctactaaaaagttgagcttggacatattttgaatttttgtaagtgaagatttttaaactgactaacttaaaaaaatagattgtaattgatgtgccttaatttgcataaatcataaatgtatgtcctctctgtaattgttttaatgtgtgcttgaaatatccagaaaacctatggagttagtaaattctgggctgtcatatgtaggatagccactttttaggtatatgtacatttatatttctatcaattccttagaaagtaaaataaatgaatagatcaaatgttgtgttcatgtttggggaaaatataatttgcagaaacctatgaagtagagcaaagatgctttaaaaagataagtttttttgaactaaattttttttagttctaataatgcacataggatattagtacatcgtacacgtgctaggaaaaaacagcttcagtgtctttgtttaatgtgttgaaactcatctttttaaatcttgaaaaaccaattgtttacttgaaacttgaaagtagcatatttttctgttttttggttgtttgttcatttgtattagcacaatttaatgtaattcctggtttggaggcagcaagacctatgagcaagaactatttacttgaccctcgtttttttctcttgttcttgtgtggtctgaaatctaaaactagactttattatgatagatttcctataagccaatttctaataacaaatagatttattatttaatctgtaccttctatcttctcataattcgtggtcttacagccttccaaaataactccagttgggcacccatgagctaggatcaaactttctttatatactttatatattttacattatttctgatttttaaagcaaatgattgccattatgattacactcaacctaaatagttatgaacagtttcagaacaatgaaaaattacaatactatgtgatagtattgtaactatttttctattttagtcatatgtcgcttatatcctaccagaactcttaaatctataatattcgatatattctacaaactgctttattgtagaagccatatttatgtttattttataatgttttctagtgtcaaactgtactgtggagaaaagaaatgttagatctgtga

SEQ ID NO: 1605 - protein, 629 aa, Homo sapien
QISPPASLCSGSTSSAMAAPEGSGLGEDARLDQETAQWLRWDKNSLTLEAVKRLIAEGNKEELRKCFGARMEFGTAGLRAAMGPGISRMNDLTPSSRLHRAFCRYLEKQFSDLKQKGIVISFDARAHPSSGGSSRRFARLAATTFISQGIPVYLFSDITPTPFVPFTVSHLKLCAGIMITASHNPKQDNGYKVYWDNGAQIISPHDKGISQAIEENLEPWPQAWDDSLIDSSPLLHNPSASINNDYFEDLKKYCFHRSVNRETKVKFVHTSVHGVGHSFVQSAFKAFDLVPPEAVPEQKDPDPEFPTVKYPNPEEGKGVLTLSFALADKTKARIVLANDPDADRLAVAEKQDSGEWRVFSGNELGALLGWWLFTSWKEKNQDRSALKDTYMLSSTVSSKILRAIALKEGFHFEETLTGFKWMGNRAKQLIDQGKTVLFAFEEAIGYMCCPFVLDKDGVSAAVISAELASFLATKNLSLSQQLKAIYVEYGYHITKASYFICHDQETIKKLFENLRNYDGKNNYPKACGKFEISAIRDLTTGYDDSQPDKKAVLPTSKSSQMITFTFANGGVATMRTSGTEPKIKYYAELCAPPGNSDPEQLKKELNELVSAIEEHFFQPQKYNLQPKAD

SEQ ID NO: 1606 - DNA, 2029 bp, Homo sapien
cagcctgcacctcagcgagcgcgccgactggcagtactcgcagcgcgagctggacgccgtcgaggtcttcttctcgcgcacggcccgggacaaccggctcggctgcatgttcgtgcgctgcgcgccctccagccgctacacgctgctcttctcgcacggcaacgccgtggacctgggccagatgtgcagcttctacattggcctcggctcccgcatcaactgcaacatcttctcctacgactactcgggatacggcgtcagctcgggcaagccctccgagaagaacctctacgccgacatcgacgccgcgtggcaggcgctgcgcacccggtatggcgtgagtcccgagaacattatcctctatggtcagagcattgggactgtccccacggtagacttggcctcgaggtatgaatgcgcagcggtaattctccattcccctctgatgtctggtttgcgtgtggcttttccggataccaggaaaacatactgctttgatgctttccccagcattgacaagatatctaaagtcacctctcctgtgttggtcattcatggtacagaggatgaggtcatcgatttctcccatggcctagcgatgtacgagcgctgtccccgagccgtggagcccctttgggttgaaggggctgggcataatgacatagagctttatgcacaatacctagaaagactaaaacagttcatatctcacgaacttcctaattcctgaagacaacaacttgatcttacctcatttactgtgaacagaagagtcctctgttttgcacatgctttaactgggtagctgtaaaggcttgataaccatgaagaagtgcccaacctttagggtgttctaatcaaagagctgatgaaatctcagtcttttgtatctagaggtggttctgctaattcacacaacacgttaaactgaacagtcgtgattcccagcttcattaccttgcaggaatgggaatgagagctgaatgtagggacaattttctagtgctgtataaagtagcctcgcatctgtttctcaaccttatccatcatttctgacattcatgcaggacttgccctgttgccaccaatgttctcggtatttcacatgcagctctctttctgccactggatacatgggttcaatccatttgtgaagctgtgatagtgtaactggaaagctagtgtggtgaaaattcctttattattttttgttaacatgctgatctttcccggacaaatgaactgaagggtaatttactggaactctcgtgtacagcttcatcaactgtaaccatataaatataactggaatattcttaaacaaaaagaaactaggggtttttttaagtgtaaatttattactagccaacagagttttactattttgattgtctggttggtttaacaaagagcctagctgactttccttctgtaaagtcctccttgtaggcttttttaaagtactgtacatatttgcaatcacattgtgcatagattcttaatggtagatatgatttcttttgtcaggctacaacaatgaactgcagattccttgtttgtaatgtaaatgattgaatacattttgttaatatgtttttattcctatgttttgctattaaaaattttataacatttccaagacaaaaattccaagtttatgctttgaagaatttatgtaattaaaatttcactaaactaatctttttagtttaggaattatttgggttttgacactggaagttgcgccaaataagcatcagaaataggagatgcttaacattgctatactacttgtgttggttaggggtttggatttgggggttctttggttttaatttttttttccacatttaaaagccttaaatgtactgtaagcctcagatcgttgtacaactggactgcggttgattgccagtttgtgtactgttgcttggatgcggcacagtggttggtaatggaataaaggatgcatggatcagaaaaaaaaaaaaaaaaaaaaaaaaaaaaaaaaaaaaaaaaaaaaaaaaaa

SEQ ID NO: 1607 - protein, 242 aa, Homo sapien
SLHLSERADWQYSQRELDAVEVFFSRTARDNRLGCMFVRCAPSSRYTLLFSHGNAVDLGQMCSFYIGLGSRINCNIFSYDYSGYGVSSGKPSEKNLYADIDAAWQALRTRYGVSPENIILYGQSIGTVPTVDLASRYECAAVILHSPLMSGLRVAFPDTRKTYCFDAFPSIDKISKVTSPVLVIHGTEDEVIDFSHGLAMYERCPRAVEPLWVEGAGHNDIELYAQYLERLKQFISHELPNS

SEQ ID NO: 1608 - DNA, 859 bp, Homo sapien
gtcctggggagattggaggggacggcagcgttctgcatgacggaggcgctgccgggccccgggtctgtgggggccgtgctctcagggcgtgtgcgggacgccacctgtgcacacctgctcagagcacggctcctcgcaggggtgaaggggcagaccaacgaaaccagatgagaccaacgacaccatgcgagacacgcttgcagacactgttgttttggaaatgtgcttccctccatctgaaatctcatccctccacccgcccactcgggcagctgtgccgtgggcagggcatgcgctcccctggctgagcaccccagagattctcctgcaccttcctcatgccgcacgctgctcatccgtctccatgtgtgtttagatccatgccattcactgactcactaacacctgcaaaatctttaaggaaaaaagctgaagggtacgaccatgcacatatgtgacctggaaaatgcaaatttagatcttttatgatttaattattattgtttcccatagaagttccctccctttgaaattaatatataatgtataaattctgcactgagccatggcggagctgggcagcccctaggttagagtggagacggaggcccaggcgcaggggtcacacctcatctggtttccttcccatctcacagcttagcttgtgcttctcaacaccaagtctttaagagcaataaaaactacaccatgaatgtttgaattttttttttttgggggggggagggtggattttgcttttcatccagaaggaaaaggggaggagagctcctttacattttttaaattaaattcataaatcccaaaaaaaaaaaaaaaaaaaaaaaaaaaaaaaaaaaaa

SEQ ID NO: 1609 - DNA, 5954 bp, Homo sapien
  Unsure 3543-3566, 5007-5030: Unknown base
cggccgccggccgccgagcgcgggagggcaggcaggggcaggagccggagggcccggggcgcggcgcggcatgtagctgcgggctcccgcgtcgcgtgaggctgtcggcccggggccccgccatggctgggatggacagtggcaacctgaagaccgcgaggctgtggcgggacgccgccctgcgtgccaggaagctgcggagcaacctgcgccagctcacgcttaccgccgccggggcctgccccggggccggggccgacgcgctcgagtcccccgcctccccccagctcgtgctgccggccaacctcggggacattgaggcactgaacctggggaacaacggcctggaggaggtacccgaggggctggggtcggcgctgggcagcctgcgcgtcctggtcctgcgcaggaaccgcttcgcccggctgcccccggcggtggccgagctcggccaccacctcaccgagctggacgtgagccacaaccggctgaccgccctgggcgcggaggtggtgagtgctctgagggagctgcggaagctcaacctcagccacaaccagctgcccgccctgcccgcccagctgggcgctctcgctcacctggaggagctggatgtcagctttaaccggctggcgcacctgcctgactccctctcctgcctctcccgcctgcgcaccctggacgtggatcacaaccagctcactgccttcccccggcagctgctgcagctggtggccctggaggagctggacgtgtccagcaaccggctgcggggcctgcctgaggatatcagtgccctgcgtgccctcaagatcctctggctgagtggggccgagcttggcacgctgcccgccggcttctgcgagctggccagtttggagagcctcatgctagacaacaacgggctgcaggctctgcccgcccagttcagctgcctgcagcggctcaaaatgctcaacctgtcctccaacctcttcgaggagttccctgccgcgctgctgcccttggctggtctggaggagctctaccttagtcgcaaccagctcacctcggtgccatccgcttatctcgggcctgggccggctttctcaccttgtggctggataataaccgcatccgctacctgccggactccatcgtggagctgaccggcctggaggagctcgtgctgcaggggaaccagatcgcggtgctgcccgaccactttggccagctctcccgggtgggtttgtggaagatcaaagacaacccactgatccagcccccctacgaggtctgcatgaaggggatcccctacatcgcagcctaccagaaggaactggctcattcccagccggcggtgcagccccggctcaagctgctcctgatggggcataaggctgcaggaaagactttgctgcgccactgcctcaccgaggagagagtggagggatgcccaggaggaggggacaaggagaagtgctacccaccgtcacctccccctgtgagcaagggcatcgaggtgaccagctggacggccgatgcctcccggggcctgcggttcatcgtgtatgacttagctggggatgaaagttatgaggtgatccagcccttcttcctgtccccaggggccctatacgtgctggtggtcaacttggccacctatgagcctcgccactttcctaccaccgtgggctccttcttgcatcgggtcggggcgagagtgccccacgcggtggtgtgcatcgtgggcacccacgcagacctgtgcggagagcgtgagctggaggagaaatgtctggacattcaccgccagatcgccctgcaggagaagcacgacgcggagggactgagccgcttggccaaggtggtggacgaggcactggcccgggacttcgagctgcgctctgccagcccccacgcagcctactatggcgtttcggacaagaaccttcgacggcgcaaggcccattttcaatacctgctcaaccaccggctgcagatcctctcccccgtgttgcctgttagctgcagggacccgcgccacttacgacgccttcgggacaagttgctgtcagttgctgagcaccgagagatcttccccaacttacacagagtactgcctcgatcctggcaggtgctggaggaactgcatttccagccacctcaggcccagcgactgtggctaagctggtgggactcggcgcgcttgggcctgcaggcgggtctgaccgaggaccgactgcagagtgccctctcctacctgcatgagagcggcaagctactctactttgaggacagtccggctctcaaggagcacgtcttccacaacctcacccgcctcatcgacatcctcaatgtcttcttccagagggatccctctttgctgctgcataagctgctcctagggaccagtggagagggcaaggcggagggggaaagctccccgcccatggcgcggtccacccccagccaggaactgctccgggccacccagctccatcagtatgtggagggctttctgttgcatgggctcttgccagctcatgtcattcggttgctgcttaagcctcatgtccaggcccagcaggacttgcagctgttgctggagctgctggagaagatgggactctgttactgcctcaataaacccaagggcaagcctttgaatgggtccacagcttggtacaagttcccatgctatgtgcagaacgaggtgccccatgcagaagcctggattaatgggaccaacctagctgggcagtcttttgtggctgagcagttgcagattgaatatagctttccttttacttttccacctgggttgtttgcacgctacagtgtccagatcaacagccatgtggtgcacaggtcggatggtaaatttcagatctttgcctatagagggaaagttcctgtggttgtgagttacagacctgccaggggagtcctgcagccagacaccctgtccattgctagccatgcatcattaccaaatatatggaccgcatggcaagccataacccccttggtggaggaactgaatgtcctacttcaggaatggcctggactgcactacaccgtgcacattctctgttctaagtgccttaagagaggatcgcccaatccacatgcttttccaggggagttgctgagtcagcccagaccggaaggagtggcagagatcatttgccccaagaacggcagcgagcgagtaaatgttgccttggtttacccacccacgccaactgtgatcagcccctgttccaagaagaatgttggtgaaaagcacagaaaccagtgacgtttgtggctgtggaatttccatggagaaaagagagcatctgaacacctggaccatcttttgcacctggcagaccctctgcactcaccccagcgtgttctgtgaacttgagtgacaacgcgtgcttgcagggtgctttttggatgactggggaagaggtggggagggggtggtggggggaagcatggacgagaacatggagcaaatgttttacaacctgaacctcagaactgtgatcctccaaggagcgcgctacttgnnnnnnnnnnnnnnnnnnnnnnnngtcgaatggcttctcagggattttgttttccgtgcacatataagccatagttacagtacaggtggcagtatttagagcactcagatttcagttctgttaaatgtgaaagagggatcgactgacgttcattgctgttccataactagtgtaaaatatgtatatgtttatctttatttttataatatgcaaatacatttaaatttatacagtttgaagcttctagcgttagttcacactgggtgcaatattctgcatgagaactgtgccaagatggggctgatttcttattttagtataagacttttttgttttttctttattctttaatcctcttcacattaaaaaaaaaaaatctctctgttagcccatggattaagtgttggttcatagagattgccaataatcagaaagaaccttaaatgtgcatttaagacagtgtcccttcccttcttttcaatgaaggtccctgcctatataaatcatctggcacgctggtgggaaatcctttgctcttccaacgtgttattagtgctgggcagagatggggcacactcaggggccaaagaggacaaaaagtccatgcaaaacttgagtcttttaatggcttaagataatcaggagtcagttctgaatcttacaaagtgctctgcttaataagtaccttacttagcagagcactttgcaaacatattacttattagcagagctctttgtagaccttccacatctggctgtcagatcttaaggttgtgaatttaggctccagttacattcactggagagcataatcccacacgggttatttataaatacagagcctctgattggacggtctcctgccaagaactagtaatacccttgttttaaaatcttcacaaggtaaaacttaaaaagccaaccaaacaaattgctctccattctacttttaattgggccaaacagcatatgctacagtagtaacatgtttttcggagagtgtaaaaaactctgtttacatttgcctcctccgtgggttgatcgaaaatgtataaaactgactgcttctcgccagcctcagacaagaagagtgagttgctggtactcgctactcttttacttcttttgtaaagtattgactcttggaaggctacagtatacaaagtctcaacatgttttttaaaagaaataaggagcaagcgactgccctgctagaaatcacaaaccgatttttgtagaatattttgtgccccaggcattaatttcactgactccagaacctgcagttcagagaatgatttcttatgatgataaaaatcgaatgggatcagacgatgtttgcatttttttaatacttgaataggacacctcaagtttgagatttcattttcttttagaacacagtcacaagattaatctggtgaatccttttgtcacagttctcgtgtgtgtgtgcgcgtctccnnnnnnnnnnnnnnnnnnnnnnnnaaaactgaatggtcacatttaattgctttttggaccattgaatagttgggaagtaagaattttttaattggcatgagacggttcctcaactgttaaattaaccaactttgacctgtctttagaaaaaggcttatttgtatgattttgggctaactccccggggaccatattaaatgacaaaaatgctcctttgggtgacacaccctacaaagtatttgctgttacgaacataaacgcccacattcttaatatctaatatttttgaccagtgatgttttatgctgtcatctgaaccctagagaagcagtgtcagaggaaaccttggtgtcacatgtgtcttagcaaaagggttaccatgatcgagggtcatgtgaccaaaagatgctccagagaagcttgagaatttgtttcaagttgggaggagggttggagatacaaaaatcactctgctctacaggactcttcagctgtctatgcaagaaattccgttttctctttcagcacctggaaagacacagcagcccaccgaggcgataggtgattcactaagcacaagaggaatgttttctaagcaaggcgtcccttgcctctcaaacaaatgccctccaagtttgttagggtttctattcctgcaacttgtagtatcaaaaccacttcctggaattgtcaaagcactgccaaaataaatgtttttcccccttctaagaaaaaaaaaatgacagtgctcatatttgacacttgtgtattggactctcttttgaatgaataaaaaggaaaaggggtttggtgtaattcctgatggggtgcgtgttgtttttcatgccatggtttgtgaattttaattgtggtttcccatttcgttgttgtaactgggcagaaattaaaaaagaaaaatcaataaaaatacaaagaaatggttaaaaa

SEQ ID NO: 1610 - protein, 1093 aa, Homo sapien
  Unsure 3543-3566, 5007-5030: Unknown amino acid
AAGRRAREGRQGQEPEGPGRGAACSCGLPRRVRLSARGPAMAGMDSGNLKTARLWRDAALRARKLRSNLRQLTLTAAGACPGAGADALESPASPQLVLPANLGDIEALNLGNNGLEEVPEGLGSALGSLRVLVLRRNRFARLPPAVAELGHHLTELDVSHNRLTALGAEVVSALRELRKLNLSHNQLPALPAQLGALAHLEELDVSFNRLAHLPDSLSCLSRLRTLDVDHNQLTAFPRQLLQLVALEELDVSSNRLRGLPEDISALRALKILWLSGAELGTLPAGFCELASLESLMLDNNGLQALPAQFSCLQRLKMLNLSSNLFEEFPAALLPLAGLEELYLSSQPAHLGAIRLSRAWAGFLTLWLDNNRIRYLPDSIVELTGLEELVLQGNQIAVLPDHFGQLSRVGLWKIKDNPLIQPPYEVCMKGIPYIAAYQKELAHSQPAVQPRLKLLLMGHKAAGKTLLRHCLTEERVEGCPGGGDKEKCYPPSPPPVSKGIEVTSWTADASRGLRFIVYDLAGDESYEVIQPFFLSPGALYVLVVNLATYEPRHFPTTVGSFLHRVGARVPHAVVCIVGTHADLCGERELEEKCLDIHRQIALQEKHDAEGLSRLAKVVDEALARDFELRSASPHAAYYGVSDKNLRRRKAHFQYLLNHRLQILSPVLPVSCRDPRHLRRLRDKLLSVAEHREIFPNLHRVLPRSWQVLEELHFQPPQAQRLWLSWWDSARLGLQAGLTEDRLQSALSYLHESGKLLYFEDSPALKEHVFHNLTRLIDILNVFFQRDPSLLLHKLLLGTSGEGKAEGESSPPMARSTPSQELLRATQLHQYVEGFLLHGLLPAHVIRLLLKPHVQAQQDLQLLLELLEKMGLCYCLNKPKGKPLNGSTAWYKFPCYVQNEVPHAEAWINGTNLAGQSFVAEQLQIEYSFPFTFPPGLFARYSVQINSHVVHRSDGKFQIFAYRGKVPVVVSYRPARGVLQPDTLSIASHASLPNIWTAWQAITPLVEELNVLLQEWPGLHYTVHILCSKCLKRGSPNPHAFPGELLSQPRPEGVAEIICPKNGSERVNVALVYPPTPTVISPCSKKNVGEKHRNQ

SEQ ID NO: 1611 - DNA, 4661 bp, Homo sapien
catcaataaccttttcagatgaaagcttatagttattcttcaataaaaattcattgactaagaagtttagagctctcttttcaagaggtttgattggctcctgaatttcaggacttgatttgtaatttttattgaagaataactataagcttacatcaataaccttttcagatgaaaacgatgatcaggattttgaattatgggatgatgtaggattaaacattccaaaacctccagacttattgcaactctaccgggattttggaaatcatcaagtaactggaaaagatcttgtagatgtggccagtggagtagaagaagatgaattagaggcccttacaccaattataagcaaccttcctccaactcttgaaactccccagcctgcagagaactccatgttagtacagaaattagaagataaaattagtttgttaaatagtgagaaatggtcattgatggagcaaatcagaagacttaaaagtgaaatggacttcctcaaaaatgaacactttgccatcccagcagtttgtgactctgttcagcctcctttggatcagttgccccacaaagactctgaggacagtggacagcatccagatgtaaatagttcagacaagggaaaaaacacagacatccatctttcaatatcagatgaagctgattccactattcctaaagagaattccccaaattcattccccaggagagaaagagaaggaatgccaccttcttctctatcaagtaaaaagacagttcattttgataaacctaataggaaattgtctcctgcattccatcaagcactactctctttttgtcgaatgtcagcagatagtcgtttaggatacgaggtgtctcgtattgcagacagtgaaaaaagcgttatgttaatgctgggacgctgcctgccacacattgttcccaatgtgctattggcaaagagagaggagttgatccccctcatattgtgtacagcatgtctacatcctgagcctaaagagcgagatcagcttctccacatacttttcaatttgatcaagaggccagatgatgagcaaaggcaaatgatactgacaggttgtgtggcatttgcgcgtcatgttggaccaacacgtgtagaagctgaacttttaccacagtgttgggaacagattaatcacaaatacccagaaagacgactgcttgtggcagaatcctgtggagcactggcaccttaccttcctaaagaaatccgtagctccttggttctttcaatgttgcaacaaatgttaatggaagataaggcagatttggtaagagaagctgttatcaaaagccttggtatcattatgggatacattgatgatccagacaaatatcatcagggttttgaattgttgctgtcagccttgggtgatccctcagaaagagtagttagtgctacacatcaagtatttttaccagcttacgctgcgtggactacagaacttggaaatttacagtctcatcttatacttacactactgaacaagattgaaaaacttctcagggaaggagaacatggactggatgaacacaaactccacatgtatctttctgccttgcagtccttgatcccatctctctttgcattagtgctacagaatgcacctttctccagcaaagccaagcttcatggtgaagtgccacagatagaagtgactaggtttcctcggcctatgtcgcctcttcaagatgtgtccactattatcggaagtcgtgagcaattggcagtgctgctgcaactttatgactaccagctagaacaagagggtacaacaggctgggagagtttactgtgggttgtcaatcaattgttgccacaacttatagaaatagttggcaaaattaatgttacttcaactgcctgtgtccatgaattctccagatttttctggcgcctttgccggacatttggcaaaatttttacaaacactaaggtaaaacctcagttccaggagattttaagactatctgaagaaaacattgattcctcagcaggaaatggggtcctcactaaagctacagttcccatttatgcaacaggagtccttacgtgttatattcagataaaggagtatttgcatatacataatgagatatcttgggaatgggacccaagtctaaacacaaaatgtgtttcatatacacattatacacatagcctgaaggaagaagaccgaaaactgttagttggattcttagaagatgtaatgacgctgctttcattatctcatgctcctcttgatagcctgaaggcttcttttgtggaattgggtgcaaacccagcctaccatgagttactattaactgttttgtggtatggtgttgtccatacttcagcactcgtgaggtgtactgctgctagaatgtttgagctgttggtgaagggggtgaatgaaactctggtagctcagagggttgttcctgctctcattactctctccagtgaccctgaaatctctgtcaggattgccacaattccagcctttggcactattatggaaacagtaattcaaagagagttgctggaaagagtgaaaatgcagttggcttctttcctggaagatcctcagtatcaagaccaacattctttgcatacagagatcataaaaacatttggtagagttggccctaacgcagaacccaggttccgagatgagtttgttataccacatttgcataagttagccttggtgaacaacttacagattgtggattctaaaagactggacattgctacgcatctttttgaagcctacagtgcactttcctgttgtttcatttcagaggatttaatggttaatcactttttacctggtctcagatgtttacggactgacatggaacatctctctccagagcatgaggttattttaagttccatgataaaagaatgtgaacaaaaagttgaaaacaagaccgtccaagagcctcaaggctcaatgtcaattgctgcaagcttagtgagtgaagatacaaagaccaagtttttgaacaaaatgggccagttgacaacatcaggtgccatgttggccaatgtatttcagagaaagaagtagaagcaggaaagaagcccccagtaaacactaagatggacctcaagccgactggttccttgtacttgaagtacttgccttttttgtttcctcagttttatgttcttgcattataattttatcctaacctccaaagatatttgcactgcttttaattactgctgtatatttgttgattttggagttacaactgtggtgatagaaaattgagttgatggtctgtaccaagtcccttgtctatgttcttgtctttcagaataatttttatataaatatatatatagtgaagaagttttttttaatttttggatgggatattcgcaaatatctgtattatacactaagctattacaatggtacttaaaataatgtaaatttgaagtcattgttataaaataataaagtggagattacttaagtatttaaattatgaaagaataatgcagactttttattgtttcttaactgactagaaagagccaccagcattactctgtgccttttggacatcagtttgtgtgttctgtaggaattgtgtgcattccattcacacagtatttctttaggatgctgtgatgatttgaattacaaatcctacagtcaatagctaaagacgaaaccttcatttcagaactctcatgaatattctttaagtgctatttaaacctccccagcacttagatgcatataatggacttacctgaggaaagacagcacataggcatggggagaggtaaccaaggtgaattttacaaactggtgtatagtagatttaaatgctcaaaaataaatgtaactgagaagagttaataattgtgagatttttcccaaattgagatacagaagaaaatatagtttgaatctgaaatttaacacttatttatgtaaaacattttatttaagatattttctaatgattttaattttagagagtaccttttcattctgtgtgttacagagaagtactgaaaagttaaggacacttgggggctacttttttccctctaaactaaaaaagacattggctgaattataactagttagttatcacctcgtcccttaaagtcagtgacctcctgtgtttgatgtatattacatagagtcttaagtcagtgtacagttccactggaatttgacagttgtctctacagtcatgcaactcgaagtagaaaagagtgctggacataggaagggggtgcttggtttgaggggttaatgtgaggcctttttgaaaaatgaatattttgataaaaagaattcttgttttagcacagttgatgcacataagtgattctcatatttgttgtataaactggtttaatacatttggaacatagttggattacattcatttcctgggaaagctagcttaccatacattcaagtttataaaacaatttgccataggcaaagccatttaaaaagttcattctgaaattatttcatttacctacagtgaaataattgtgaactaagtagtctttctgaaaactgttgggttctaggcattcctgagaaattgaaagtggctacctttcatgtcaaaaatgttgatctattataaataaaatgtttttgcat

SEQ ID NO: 1612 - DNA, 1072 bp, Homo sapien
ggcacgaggcgacggtgcggggcgcgcgggcgacgggccagcgggatgggagcagggtcccccggcggcccgcagcctcgggagccgcgctgaagccgggggcgggaccagcgcggagccgacatgtgtctgcgcctcggaggcctgagtgtgggcgacttccggaaggtgctgatgaagacaggcctggtgctggtggtgctgggccatgtgagcttcatcacagctgccctgttccatggcacagtgctgcgctacgtgggcacccctcaagatgcggtggctctgcagtactgcgtggtcaacatcctctctgtcacttccgccatcgtggtcatcacttcaggcatcgcagccatcgtgttgtcacgctacctccctagcacccccctgcgctggacagtgtttagctcgagcgtggcctgtgctctcctttctctgacctgtgccctcggcctcttggcctccatcgccatgacctttgccacccagggcaaggcactgctggctgcctgcacttttgggagctctgaactactggccctcgcacctgactgtcccttcgaccccacacgcatttatagctccagcctgtgcctctggggcatcgccctagtgctctgcgtggcggagaacgtgtttgctgtacgctgtgctcagctcacccaccagctgctggagctgaggccctggtgggggaaaagcagccaccacatgatgcgggagaacccagagctggtggagggccgtgacctgctgagctgcaccagctctgagcctctgaccctctgagagatgatgtcctgcccaggcccgatggccactaggaccctgcaagcaactctgctctgtgaccaggccaggattcctggagctggcctgagagggctcaatggaccctcggggacccaagtggggctttcaaccctctcccccaccacccagcccactgcactgaaatgagactttattctgaaattattaaaaagaacagagatgctcaaaaaaaaaaaaaaaaaaaaaaaaaaaaaaaaaaaaaaaaaaaaaaaaaaaaaaaaaaaaaaaaaaaaaa

SEQ ID NO: 1613 - protein, 222 aa, Homo sapien
MCLRLGGLSVGDFRKVLMKTGLVLVVLGHVSFITAALFHGTVLRYVGTPQDAVALQYCVVNILSVTSAIVVITSGIAAIVLSRYLPSTPLRWTVFSSSVACALLSLTCALGLLASIAMTFATQGKALLAACTFGSSELLALAPDCPFDPTRIYSSSLCLWGIALVLCVAENVFAVRCAQLTHQLLELRPWWGKSSHHMMRENPELVEGRDLLSCTSSEPLTL

SEQ ID NO: 1614 - DNA, 514 bp, Homo sapien
gtcctctctgctctcgcggccgactcgcaagatggcgccgcagaaagacaggaagcccaagaggtcaacctggaggtttaatttggaccttactcatccagtagaagatggaatttttgattctggaaattttgagcaatttctacgggagaaggttaaagtcaatggcaaaactggaaatctcgggaatgttgttcacattgaacgcttcaagaataaaatcacagttgtttctgagaaacagttctctaaaaggtatttgaaataccttaccaagaaataccttaagaagaacaatcttcgtgattggcttcgagtggttgcatctgacaaggagacctacgaacttcgttacttccagattagtcaagatgaagatgaatcagagtcggaggactaggcaaaggctccccttacagggctttgcttattaataaaataaatgaagtatacatgagaaataccaagaaattggcttttagtttatcagtgaataaaaaatattatactcttg

SEQ ID NO: 1615 - protein, 132 aa, Homo sapien
SSLLSRPTRKMAPQKDRKPKRSTWRFNLDLTHPVEDGIFDSGNFEQFLREKVKVNGKTGNLGNVVHIERFKNKITVVSEKQFSKRYLKYLTKKYLKKNNLRDWLRVVASDKETYELRYFQISQDEDESESED

SEQ ID NO: 1616 - DNA, 2882 bp, Homo sapien
  Unsure 959-1096, 1253-1418: Unknown base
cccaatttgtggttctaatttcaattttaattccttttttttttttgtcacgagatataagaaagtgctttttgccttgaatggacaattttagggctgtgctcactagtcttttcaggctggactgaaatgtcgggcccatggagccctgtgttttgtgcatcgggatgagaaatgaagcacttcacgctggctttcctaagtcacggggcgtgtattgccgtggcttagtgcaaagcattctttctcagagcatttagaggcatgcgtggcattttttcagtgggtgtgagattgcacaatacccaggctcccttctactgtggggaagggcctgcatgttggctgttttttaaacttctagttcaatttccttccataatgctactgattttctggcatacagccgaattccatcttttaagcatgctttctacggtgggcttttcaaaacaggtttgagttttgtatgcacacgtttactacctctaactcctacatcagctagtgtggaagagggtgcacctcaaagcttttacacgtaaggacagcggcttggaatgtgagagccttttctccaagcagacccacactctgcatctcagtggcagctcccacaacgtgactgcaatgtctcttatacagtattccttggtgttttcttagtgtctggatgttcttacgtgaaatctgctccccagccctggtccttggcattttctgcttgaagctgggctgattttcttgtaatttacagcaggacgctttcagcagcagtctcttgggattttatctaagatgtttgaggatgagagggcaagaactataaacactcattaattctagtagtctccccatggccagacaatggcgattgttatttaatgagcttttcctttcaatggaattcagctctcacattagtatgatttcatttgatgtttcaaatagcaaagatnnnnnnnnnnnnnnnnnnnnnnnnnnnnnnnnnnnnnnnnnnnnnnnnnnnnnnnnnnnnnnnnnnnnnnnnnnnnnnnnnnnnnnnnnnnnnnnnnnnnnnnnnnnnnnnnnnnnnnnnnnnnnnnnnnnnnnnnnngacagactgctttgatcaaccctaaatgcaaaagcagcctatttttctttgtttaaaagtcaaaacataaaaaagcagagtataacatacaaaccattcttaactattcattaaaatgggtccttcaacaccttagtggggtttgttgttgttgctnnnnnnnnnnnnnnnnnnnnnnnnnnnnnnnnnnnnnnnnnnnnnnnnnnnnnnnnnnnnnnnnnnnnnnnnnnnnnnnnnnnnnnnnnnnnnnnnnnnnnnnnnnnnnnnnnnnnnnnnnnnnnnnnnnnnnnnnnnnnnnnnnnnnnnnnnnnnnnnnnnnnnngacttcagtgttgactgctttggaggcacaaacccatgcaagcgttagttccaaagttcagtgtgtacccttaaatgaacaatgaagcaggtaaaattacccttgaaaaaaatcccttggaccacccataaatgacagtgactttttcaatatggactcatcatagccagttttccttttgaagttggaactgatcacccttttgtcatctgtaccagatcagtagttggcttgtgttacattttgtgtgtgtgtgtgcgtgttttaaaccagtgcatataaattgtatgttaaatgtaagtaactttaagttgacttatctcttcacagtaatcaagcctcacgtaattcatgctttttaaattcagccagccccccctctctgaaattttattatgtaaataatttgtgttccctgatcactcgtttaagttcttagttgtatgtcatctcttctctagcaggaattggcaaacttttttgtaaaggggtagaaagtgaagattttaggctttgcaggccatatagcctctgctgcaaatgctcagccctgctgttgtaatgtaaaagctgccacagacactacatgaacacgaatgagtgtggctggtgttccaataaaactttatttacacaaacgggtggcccttttgggctgtagtttgtcaacccttgctctaacccttgactgagagctactttattaagccctgagggcaggagctatcccaattttgtgttccccagggcaccaaaacacagtgctttggcatagagtaggcactcaacaagtgtgtgaacagatggagagccagccctagtcagtgcactcaccctttgaggctctggttcctccaaacaatgattcgttgtctggattggctggaactgtcacccccgcaattctactccccacccacccatgtgaccttaatgtcagttgctggtctgttgctcttcggggagggagagatggcctggatacagagctaagcaaatgcttctttaagggcccttaaaagtgaaaagtaacttgcaagaggttgagatccttctgagctaggagaacttattccactgcacctggccctgttttcatggcttttatttcctttcatcccacacatttgtctgcagtactagacatgttttacaaatcaacaagtttacacaagtatatgcagcttgttttggggggaaaggagacaaaatatgcatattttctgtgtggatttgtgcctcttaattgtgtttctagtctctaaggtgaccctttaacctactcaagatggggcccagagaagtggcctgcgttacagatttattttggcatatgtactaagttccattttctctttacaaataaagtgttttctttcttttctgtctccgaaaaaaaatctatgtcgggtgcggagaaagaggtaatgaaatggcagtactcgataggcaagcttatcgata

SEQ ID NO: 1617 - protein, 11 aa, Homo sapien
  Unsure 959-1096, 1253-1418: Unknown amino acid
MKWQYSIGKLI

SEQ ID NO: 1618 - DNA, 3204 bp, Homo sapien
ggcggggctgggcgcaggcagtctcccgccgccgccgccgctgccggacgcgcagagcgaggggcggctggaccgacggctgccgggccgagcgcacagagtcgcggcgcagggggcgtccccggccgggacgcgggtcgcgtcgttgtcctccgcgagcgtccggattgcaggctgtctgtccccagaccccagagcacgtccggcaccaccatgactgggctgttgaagaggaaatttgaccagctggatgaggacaactcctcggtctcctcctcctcctcttcctctgggtgccagtctcgctcctgctccccaagctcttctgtctcccgtgcctgggactcagaggaggaaggcccctgggatcagatgcccctgcctgaccgtgacttctgcggccccagaagtttcacccccctgtctatcctgaagcgagctcgccgggagcgcccaggccgtgtagcctttgatgggatcaccgtcttctacttcccccgctgccagggcttcaccagtgtgcccagccgtggtggctgtactctgggtatggcccttcgccacagtgcttgccgtcgcttctctttggctgagtttgcgcaggagcaagcccgtgcacggcacgagaagctccgccagcgcttgaaagaggagaagttggagatgctgcagtggaagctttcggcagctggggtaccccaggcagaggcagggctgccacctgtggtggatgccattgatgacgcctctgtggaggaggacttggcagtcgctgtggcaggtggccggttggaagaagtgagcttcctacagccctacccagcccggcgacgtcgagctctgctgagggcttcaggtgtgcgaaggatcgatcgggaggagaagcgggagctgcaggcactgcgccaatcccgggaggattgtggctgtcactgcgataggatctgcgaccctgagacctgcagctgcagcctggcaggcatcaagtgccagatggaccacacagcattcccctgtggctgctgcagggagggctgtgagaaccccatgggccgtgtggaatttaatcaggcaagagttcagacccatttcatccacacactcacccgcctgcagttggaacaggaggctgagagctttagggagctggaggcccctgcccagggcagcccacccagccctggtgaggaggccctggtccctactttcccactggccaagccccccatgaacaatgagctgggagacaacagctgcagcagcgacatgactgattcttccacagcatcttcatcagcatcgggcactagtgaggctcctgactgccccacccacccaggcctgcctggccctggcttccagcctggcgttgatgatgacagcctggcacgcatcttgagtttcagtgactctgacttcggtggggaggaggaggaagaggaggaagggagtgtggggaacctggacaacctcagctgcttccatccagctgacatctttggtactagtgaccctggtggcctggccagctggacccacagctattctggctgtagcttcacatcaggcatcctggatgagaatgccaacctggatgccagctgcttcctaaatggtggccttgaagggtcaagggaaggcagccttcctggcacctcagtgccacccagcatggacgctggccggagtagctcagtggatctcagcttgtcttcttgtgactcctttgagttactccaggctctgccagattatagtctggggcctcactacacatcacagaaggtgtctgacagcctggacaacatcgaggcacctcacttccccctgcctggcctgtctccacctggggatgccagcagttgcttcctggagtccctcatgggcttctccgagccagccgccgaagccctagatccctttattgacagccagtttgaggacactgtcccagcatctctaatggagcctgtgccggtgtgaggaccaggatgtcttttcccagccccaagagacctgttgctgctttcttgtaattatggggctccccagagtctgcgtaacagtctcccactggctggctcacccacaggtgccatgtgcacactcctggttttcaaacaattctctggatttatttatttgttttaacttttctgtgctgaagagaggactagggggagggggcttcccctttcagctgcccggccccccacacccacagcttgctcttctatctccacaacgtgagcctggaagaggagaaaatgtggctcctctggagcttggcagaccacttttcggtctttgcgtgatgttccttagcccaaagacggtgagacagggctgaaatcaggtggcttctgccaccctgagccctagacccatgggtggctaaatccactggactgtgaagactataatttatttccataatttatttggagattgaggaggctttggttgcacttctttggctggtgggtaatgccaggggtggggtgggcacaggccctcaagagccccttttgccttgtagtcctacaccttgccctgcctgggctttggtgcagactaggtgtggatttgagctctgtgatctatgtctgctgcctggctcctagatggctctgcgggcaggtgctggccaaggacatcatctaggcagggggagagcctgggctgaacagctgtgaccaaaactcccttctgccccaccctgccccctccacttcctgccctctgttccatcttcccccttcccaaaggccacagcctttattccaggcccagggatgtaggagggggaaggaggaaacaggaagcccagagagggcaaagggcctacctcggggcgcgaaccatgccccagactattatctcagggctttctgggcactgcacttcagcgtggcccacctgcccatgccctgaggccagttggcgaggggtggctcctgagggtttttataccctttgtttgctaatgtttaattttgcatcataatttctacattgtccctgagtgtcagaactataatttattccatttctctctgtgtctgtgccaagaaacgcaggctctgggcctgccccttgcccaggaggccttgccagcctgtgtgcttgtgggaacaccttgtacctgagcttacaggtaccaataaagaggctttatttttaaaaaaaaaaaaaaaaaaaaaa

SEQ ID NO: 1619 - protein, 589 aa, Homo sapien
MTGLLKRKFDQLDEDNSSVSSSSSSSGCQSRSCSPSSSVSRAWDSEEEGPWDQMPLPDRDFCGPRSFTPLSILKRARRERPGRVAFDGITVFYFPRCQGFTSVPSRGGCTLGMALRHSACRRFSLAEFAQEQARARHEKLRQRLKEEKLEMLQWKLSAAGVPQAEAGLPPVVDAIDDASVEEDLAVAVAGGRLEEVSFLQPYPARRRRALLRASGVRRIDREEKRELQALRQSREDCGCHCDRICDPETCSCSLAGIKCQMDHTAFPCGCCREGCENPMGRVEFNQARVQTHFIHTLTRLQLEQEAESFRELEAPAQGSPPSPGEEALVPTFPLAKPPMNNELGDNSCSSDMTDSSTASSSASGTSEAPDCPTHPGLPGPGFQPGVDDDSLARILSFSDSDFGGEEEEEEEGSVGNLDNLSCFHPADIFGTSDPGGLASWTHSYSGCSFTSGILDENANLDASCFLNGGLEGSREGSLPGTSVPPSMDAGRSSSVDLSLSSCDSFELLQALPDYSLGPHYTSQKVSDSLDNIEAPHFPLPGLSPPGDASSCFLESLMGFSEPAAEALDPFIDSQFEDTVPASLMEPVPV

SEQ ID NO: 1620 - DNA, 5510 bp, Homo sapien
atcgctctctggtagagttgacgtgacactcatttctgttgtgggtggggccctggttgggaggcattggctccactgcagcctgggtgtctagagaccacattctcaccctgcctttgttactgggaaaccgaacgcggcgctgtggctttcagcttgggtaagccgggtctgcggcggggattgccatctgaagacagaggcaggagggcagccacaccttgcccagatcatgattctggaaggaggtggtgtaatgaatctcaaccccggcaacaacctccttcaccagccgccagcctggacagacagctactccacgtgcaatgtttccagtgggttttttggaggccagtggcatgaaattcatcctcagtactggaccaagtaccaggtgtgggagtggctccagcacctcctggacaccaaccagctggatgccaattgtatccctttccaagagttcgacatcaacggcgagcacctctgcagcatgagtttgcaggagttcacccgggcggcagggacggcggggcagctcctctacagcaacttgcagcatctgaagtggaacggccagtgcagtagtgacctgttccagtccacacacaatgtcattgtcaagactgaacaaactgagccttccatcatgaacacctggaaagacgagaactatttatatgacaccaactatggtagcacagtagatttgttggacagcaaaactttctgccgggctcagatctccatgacaaccaccagtcaccttcctgttgcagagtcacctgatatgaaaaaggagcaagacccccctgccaagtgccacaccaaaaagcacaacccgagagggactcacttatgggaattcatccgcgacatcctcttgaacccagacaagaacccaggattaataaaatgggaagaccgatctgagggcgtcttcaggttcttgaaatcagaggcagtggctcagctatggggtaaaaagaagaacaacagcagcatgacctatgaaaagctcagccgagctatgagatattactacaaaagagaaatactggagcgtgtggatggacgaagactggtatataaatttgggaagaatgcccgaggatggagagaaaatgaaaactgaagctgccaatactttggacacaaaccaaaacacacaccaaataatcagaaacaaagaactcctggacgtaaatatttcaaagactacttttctctgatatttatgtaccatgaggggaaaaagaaactacttctaacgggaagaagaaacactacagtcgattaaaaaaattattttgttacttcgaagtatgtcctatatggggaaaaaacgtacacagttttctgtgaaatatgatgctgtatgtggttgtgattttttttcacctctattgtgaattctttttcactgcaagagtaacaggatttgtagccttgtgcttcttgctaagagaaagaaaaacaaaatcagagggcattaaatgttttgtatgtgacatgatttagaaaaaggtgatgcatcctcctcacataagcatccatatgscttcgtcaagggaggtgaacattgttgctgagttaaattccagggtctcagatggttaggacaaagtggatggatgccgggaagtttaacctgagccttaggatccaatgagtggagaatggggacttccaaaacccaaggttggctataatctctgcataaccacatgacttggaatgcttaaatcagcaagaagaataatggtggggtctttatactcattcaggaatggtttatctgatgccagggctgtcttcctttctcccctttggatggttggtgaaatactttaattgccctgtctgctcacttctagctatttaagagagaacccagcttggttcttttttgctccaagtgcttaaaaataagttggaaaaaggagacggtggtgtggaaatggctgaagagtttgctcttgtatccctatagtccaaggtttctcaatctgcacaattgacatttttggccggagtgttctttgtggtgagggctttcctgtgcattgtaagatgttcagcagtatccactcatggtctctaaccacttgacaccagaaaccccccagctgtgataacgcaaaatgtctctagacatcaccaaatgttccctgggggtggcaaatttgcccttgattgagaaccaccagtttagctagtcaatatgaggatggtggtttattctcagaagaaaaagatatgtaaggtcttttagctccttagagtgaagcaaaagcaagacttcaacctcaacctatctttatgttttaaatattagggacaataagttgaaatagctagaggagcttcttttcagaaccccagatgagagccaatgtcagataaagtaagcatagcaatgtagcaggaactacaatagaagacattttcactggaattacaaagcagaattaaaattatattgtagaaggaaacaccaagaaaagaatttccagggaaaatcctctttgcaggtattaattcttataattttttgtcttttggattatctgtttactgtctcatctgaactgatcccaggtgaacggtttattgcctagatttgtactcagaggaattttttttgttttgttttgtcttttaagaaaggaaagaaaggatgaaaaaaataaacagaaaactcagctcaggcacaattgtcaccaaggagttaaaagcttcttcttcaatagaggaattgttctgggggtcctggagacttaccattgagccatgcaatctgggaagcacaggaataagtagacactttgaaaatggatttgaatgttctcatcccttttgcagcttttctttttggctctctcatgtccttggcttgctcctctattctacctctctttctccagcaataatatgcaaatgaagacatgtatccataagaaggagtgctcttcatcaactaatagagcacctaccacagtgtcatacctggtagaggtgagcaattcatattcaaaggttgcaaagtgtttgtaatatattcatgaggctggaagtaagaagaattaaaaatttgtcctaattacaatgagaaccattctaggtagtgatcttggagcacacatgaataactttctgaaggtgcaaccaaatccatttttatttctgcctggcttggtcacctctgtaaaggtttaacttagtgttgtcaagtaacagttactgaaagagctgagaaaaagaacaatgaacagcaacgatcttgactgtgcaactcagacattcctgcagaaaagacatatgttgctttacaagaaggccaaagaactatggggccttcccagcatttgactgttcattgcatagaatgaattaaatatccagttacttgaatgggtataacgcatgaatatttgtgtgtctgtgtgtgtgtctgagttgtgtgattttattaggggcatctgccaattctctcactgtggttccttctctgactttgcctgttcatcatctaaggaggctagatccttcgctgacttcaccattcctcaaacctgtaagtttctcacttcttccaaattggctttggctctttcttcaacctttccattcaagagcaatctttgctaaggagtaagtgaatgtgaagagtaccaactacaacaattctacagataattagtggattgtgttgtttgttgagagtgaaggtttcttggcatctggtgcctgattaaggcttgagtattaagttctcagcatatctctctattgtcttgacttgagtttgctgcattttctatgtgctgttcgtgacttggagaacttaaagtaatcgagctatgccaacttggggtggtaacagagtacttcccaccacagtgttgaaagggagagcaaagtcttatggataaaccctcctttcttttggggacacatggctctcacttgagaagctcacctgtgctgaatgtccacatggtcactaaacatgttatccttaaaccccccgtatgcctgagttgaaagggctctctcttattaggttttcatgggaacatgaggcagcaaatctattgctaagactttaccaggctcaaatcatctgaggctgatagatatttgacttggtaagacttaagtaaggctctggctcccaggggcataagcaacagtttcttgaatgtgccatctgagaagggagacccaggttatgagttttcctttgaacacattggtcttttctcaaagttcctgccttgctagactgttagctctttgaggacagggactatgtcttatcaatcactattattttcctgttacctagcatgggacaagtacacaacacatatttgttcaatgaatgaatgaatgtcttctaaaagactcctctgattgggagaccatatctataattgggatgtgaatcatttcttcagtggaataagagcacaacggcacaaccttcaaggacatattatctactatgaacattttactgtgagactctttattttgccttctacttgcgctgaaatgaaaccaaaacaggccgttgggttccacaagtcaatatatgttggatgaggattctgttgccttattgggaactgtgagacttatctggtatgagaagccagtaataaacctttgacctgttttaaccaatgaagattatgaatatgttaatatgatgtaaattgctatttaagtgtaaagcagttctaagttttagtatttgggggattggtttttattatttttttcctttttgaaaaatactgagggatcttttgataaagttagtaatgcatgttagattttagttttgcaagcatgttgtttttcaaatatatcaagtatagaaaaaggtaaaacagttaagaaggaaggcaattatattattcttctgtagttaagcaaacacttgttgagtgcctgctatgtgcacggcatgggcccatatgtgtgaggagcttgtctaattatgtaggaagcaatagatctcggtagttacgtattgggcagatacttactgtatgaatgaaagaacatcacagtaatcacaatatcagagctgaattatcctcagtgtagcttcttggaattcagtttctggaactagagatagagcatttattaaaaaaaactcctgttgagactgtgtcttatgaacctctgaaacgtacaagccttcacaagtttaactaaattgggattaatctttctgtagttatctgcataattcttgtttttctttccatctggctcctgggttgacaatttgtggaaacaactctattgctactatttaaaaaaaatcagaaatctttccctttaagctatgttaaattcaaactattcctgctattcctgttttgtcaaagaattatatttttcaaaatatgtttatttgtttgatgggtcccaggaaacactaataaaaaccacagagaccagcctggaaaaaaaaaaaaaaaaaaaaa

SEQ ID NO: 1621 - protein, 43 aa, Homo sapien
HDSGRRWCNESQPRQQPPSPAASLDRQLLHVQCFQWVFWRPVA

SEQ ID NO: 1622 - DNA, 3828 bp, Homo sapien
cgactccttagagcatggcatggctcagaggtgctggtaaaactgatgggggtttttgctgtccctcccctcagcgccgacaccatgtggatccaggttcggaccatggacgggaggcagacccacacggtggactcgctgtccaggctgaccaaggtggaggagctgaggcggaagatccaggagctgttccacgtggagccaggcctgcagaggctgttctacaggggcaaacagatggaggacggccataccctcttcgactacgaggtccgcctgaatgacaccatccagctcctggtccgccagagcctcgtgctcccccacagcaccaaggagcgggactccgagctctccgacaccgactccggctgctgcctgggccagagtgagtcagacaagtcctccacccacggcgaggcggccgccgagactgacagcaggccagccgatgaggacatgtgggatgagacggaattggggctgtacaaggtcaatgagtacgtcgatgctcgggacacgaacatgggggcgtggtttgaggcgcaggtggtcagggtgacgcggaaggccccctcccgggacgagccctgcagctccacgtccaggccggcgctggaggaggacgtcatttaccacgtgaaatacgacgactacccggagaacggcgtggtccagatgaactccagggacgtccgagcgcgcgcccgcaccatcatcaagtggcaggacctggaggtgggccaggtggtcatgctcaactacaaccccgacaaccccaaggagcggggcttctggtacgacgcggagatctccaggaagcgcgagaccaggacggcgcgggaactctacgccaacgtggtgctgggggatgattctctgaacgactgtcggatcatcttcgtggacgaagtcttcaagattgagcggccgggtgaagggagccccatggttgacaaccccatgagacggaagagcgggccgtcctgcaagcactgcaaggacgacgtgaacagactctgccgggtctgcgcctgccacctgtgcgggggccggcaggaccccgacaagcagctcatgtgcgatgagtgcgacatggccttccacatctactgcctggacccgcccctcagcagtgttcccagcgaggacgagtggtactgccctgagtgccggaatgatgccagcgaggtggtactggcgggagagcggctgagagagagcaagaagaaggcgaagatggcctcggccacatcgtcctcacagcgggactggggcaagggcatggcctgtgtgggccgcaccaaggaatgtaccatcgtcccgtccaaccactacggacccatcccggggatccccgtgggcaccatgtggcggttccgagtccaggtcagcgagtcgggtgtccatcggccccacgtggctggcatacacggccggagcaacgacggagcgtactccctagtcctggcggggggctatgaggatgacgtggaccatgggaattttttcacatacacgggtagtggtggtcgagatctttccggcaacaagaggaccgcggaacagtcttgtgatcagaaactcaccaacaccaacagggcgctggctctcaactgctttgctcccatcaatgaccaagaaggggccgaggccaaggactggcggtcggggaagccggtcagggtggtgcgcaatgtcaagggtggcaagaatagcaagtacgcccccgctgagggcaaccgctacgatggcatctacaaggttgtgaaatactggcccgagaaggggaagtccgggtttctcgtgtggcgctaccttctgcggagggacgatgatgagcctggcccttggacgaaggaggggaaggaccggatcaagaagctggggctgaccatgcagtatccagaaggctacctggaagccctggccaaccgagagcgagagaaggagaacagcaagagggaggaggaggagcagcaggaggggggcttcgcgtcccccaggacgggcaagggcaagtggaagcggaagtcggcaggaggtggcccgagcagggccgggtccccgcgccggacatccaagaaaaccaaggtggagccctacagtctcacggcccagcagagcagcctcatcagagaggacaagagcaacgccaagctgtggaatgaggtcctggcgtcactcaaggaccggccggcgagcggcagcccgttccagttgttcctgagtaaagtggaggagacgttccagtgtatctgctgtcaggagctggtgttccggcccatcacgaccgtgtgccagcacaacgtgtgcaaggactgcctggacagatcctttcgggcacaggtgttcagctgccctgcctgccgctacgacctgggccgcagctatgccatgcaggtgaaccagcctctgcagaccgtcctcaaccagctcttccccggctacggcaatggccggtgatctccaagcacttctcgacaggcgttttgctgaaaacgtgtcggagggctcgttcatcggcactgattttgttcttagtgggcttaacttaaacaggtagtgtttcctccgttccctaaaaaggtttgtcttcctttttttttatttttatttttcaaatctatacattttcaggaatttatgtattctggctaaaagttggacttctcagtattgtgtttagttctttgaaaacataaaagcctgcaatttctcgacaaaacaacacaagattttttaaagatggaatcagaaactacgtggtgtggaggctgttgatgtttctggtgtcaagttctcagaagttgctgccaccaactctttaagaaggcgacaggatcagtccttctctagggttctggcccccaaggtcagagcaagcatcttcctgacagcattttgtcatctaaagtccagtgacatggttccccgtggtggcccgtggcagcccgtggcatggcgtggctcagctgtctgttgaagttgttgcaaggaaaagaggaaacatctcgggcctagttcaaacctttgcctcaaagccatcccccaccagactgcttagcgtctgagatccgcgtgaaaagtcctctgcccacgagagcagggagttggggccacgcagaaatggcctcaaggggactctgctccacgtggggccaggcgtgtgactgacgctgtccgacgaaggcggccacggacggacgccagcacacgaagtcacgtgcaagtgcctttgattcgttccttctttctaaagacgacagtctttgttgttagcactgaattattgaaaatgtcaaccagattctagaaactgcggtcatccagttcttcctgacaccggatgggtgcttgggaaccgtttgagccttatagatcatttacattcaatttttttaactcagcaagtgagaacttacaagagggtttttttttaatttttttttctcttaatgaacacattttctaaatgaattttttttgtagttactgtatatgtaccaagaaagatataacgttagggtttggttgtttttgtttttgtattttttttcttttgaaagggtttgttaatttttctaattttaccaaagtttgcagcctatacctcaataaaacagggatattttaaatcacatacctgcagacaaactggagcaatgttatttttaaagggtttttttcacctccttattcttagattattaatgtattagggaagaatgagacaattttgtgtaggctttttctaaagtccagtactttgtccagattttagattctcagaataaatgtttttcacagattgaaaaaaaaaaaaaa

SEQ ID NO: 1623 - protein, 793 aa, Homo sapien
MWIQVRTMDGRQTHTVDSLSRLTKVEELRRKIQELFHVEPGLQRLFYRGKQMEDGHTLFDYEVRLNDTIQLLVRQSLVLPHSTKERDSELSDTDSGCCLGQSESDKSSTHGEAAAETDSRPADEDMWDETELGLYKVNEYVDARDTNMGAWFEAQVVRVTRKAPSRDEPCSSTSRPALEEDVIYHVKYDDYPENGVVQMNSRDVRARARTIIKWQDLEVGQVVMLNYNPDNPKERGFWYDAEISRKRETRTARELYANVVLGDDSLNDCRIIFVDEVFKIERPGEGSPMVDNPMRRKSGPSCKHCKDDVNRLCRVCACHLCGGRQDPDKQLMCDECDMAFHIYCLDPPLSSVPSEDEWYCPECRNDASEVVLAGERLRESKKKAKMASATSSSQRDWGKGMACVGRTKECTIVPSNHYGPIPGIPVGTMWRFRVQVSESGVHRPHVAGIHGRSNDGAYSLVLAGGYEDDVDHGNFFTYTGSGGRDLSGNKRTAEQSCDQKLTNTNRALALNCFAPINDQEGAEAKDWRSGKPVRVVRNVKGGKNSKYAPAEGNRYDGIYKVVKYWPEKGKSGFLVWRYLLRRDDDEPGPWTKEGKDRIKKLGLTMQYPEGYLEALANREREKENSKREEEEQQEGGFASPRTGKGKWKRKSAGGGPSRAGSPRRTSKKTKVEPYSLTAQQSSLIREDKSNAKLWNEVLASLKDRPASGSPFQLFLSKVEETFQCICCQELVFRPITTVCQHNVCKDCLDRSFRAQVFSCPACRYDLGRSYAMQVNQPLQTVLNQLFPGYGNGR

SEQ ID NO: 1624 - DNA, 6060 bp, Homo sapien
caactatacaaaacagtatccggtgtttgtgggccacaagccaggacggaacaccacacagaggcacaggctggacatccaggtgattatgatcatgaacggaaccctctacattgctgctagggaccatatttatactgttgatatagacacatcacacacggaagaaatttattgtagcaaaaaactgacatggaaatctagacaggccgatgtagacacatgcagaatgaagggaaaacataaggatgagtgccacaactttattaaagttcttctaaagaaaaacgatgatgcattgtttgtctgtggaactaatgccttcaacccttcctgcagaaactataagatggatacattggaaccattcggggatgaattcagcggaatggccagatgcccatatgatgccaaacatgccaacgttgcactgtttgcagatggaaaactatactcagccacagtgactgacttccttgccattgacgcagtcatttaccggagtcttggagaaagccctaccctgcggaccgtcaagcacgattcaaaatggttgaaagaaccatactttgttcaagccgtggattacggagattatatctacttcttcttcagggaaatagcagtggagtataacaccatgggaaaggtagttttcccaagagtggctcaggtttgtaagaatgatatgggaggatctcaaagagtcctggagaaacagtggacgtcgttcctgaaggcgcgcttgaactgctcagttcctggagactctcatttttatttcaacattctccaggcagttacagatgtgattcgtatcaacgggcgtgatgttgtcctggcaacgttttctacaccttataacagcatccctgggtctgcagtctgtgcctatgacatgcttgacattgccagtgtttttactgggagattcaaggaacagaagtctcctgattccacctggacaccagttcctgatgaacgagttcctaagcccaggccaggttgctgtgctggctcatcctccttagaaagatatgcaacctccaatgagttccctgatgataccctgaacttcatcaagacgcacccgctcatggatgaggcagtgccctccatcttcaacaggccatggttcctgagaacaatggtcagataccgccttaccaaaattgcagtggacacagctgctgggccatatcagaatcacactgtggtttttctgggatcagagaagggaatcatcttgaagtttttggccagaataggaaatagtggttttctaaatgacagccttttcctggaggagatgagtgtttacaactctgaaaaaatgcagctatgatggagtcgaagacaaaaggatcatgggcatgcagctggacagagcaagcagctctctgtatgttgcgttctctacctgtgtgataaaggttccccttggccggtgtgaacgacatgggaagtgtaaaaaaaacctgtattgcctccagagacccatattgtggatggataaaggaaggtggtgcctgcagccatttatcacccaacagcagactgacttttgagcaggacatagagcgtggcaatacagatggtctgggggactgtcacaattcctttgtggcactgaatgggcattctagttccctcttgcccagcacaaccacatcagattcgacggctcaagaggggtatgagtctaggggaggaatgctggactggaagcatctgcttgactcacctgacagcacagaccctttgggggcagtgtcttcccataatcaccaagacaagaagggagtgattcgggaaagttacctcaaaggccacgaccagctggttcccgtcaccctcttggccattgcagtcatcctggctttcgtcatgggggccgtcttctcgggcatcaccgtctactgcgtctgtgatcatcggcgcaaagacgtggctgtggtgcagcgcaaggagaaggagctcacccactcgcgccggggctccatgagcagcgtcaccaagctcagcggcctctttggggacactcaatccgaagacccaaagccggaggccatcctcacgccactcatgcacaacggcaagctcgccactcccggcaacacggccaagatgctcattaaagcagactagcaccacctggacctgacggccctccccaccccagagtcaaccccaacgctgcagcagaagcggaagcccagccgcggcagccgcgagtgggagaggaaccagaacctcatcaatgcctgcacaaaggacatgccccccatgggctcccctgtgattcccacggacctgcccctgcgggcctcccccagccacatccccagcgtggtggtcctgcccatcacgcagcagggctaccagcatgagtacgtggaccagcccaaaatgagcgaggtggcccagatggcgctggaggaccaggccgccacactggagtataagaccatcaaggaacatctcagcagcaagagtcccaaccatggggtgaaccttgtggagaacctggacagcctgccccccaaagttccacagcgggaggcctccctgggtcccccgggagcctccctgtctcagaccggtctaagcaagcggctggaaatgcaccactcctcttcctacggggttgactataagaggagctaccccacgaactcgctcacgagaagccaccaggccaccactctcaaaagaaacaacactaactcctccaattcctctcacctctccagaaaccagagctttggcaggggagacaacccgccgcccgccccgcagagggtggactccatccaggtgcacagctcccagccatctggccaggccgtgactgtctcgaggcagcccagcctcaacgcctacaactcactgacaaggtcggggctgaagcgtacgccctcgctaaagccggacgtaccccccaaaccatcctttgctcccctttccacatccatgaagcccaatgatgcgtgtacataatcccagggggagggggtcaggtgtcgaaccagcaggcaaggcgaggtgcccgctcagctcagcaaggttctcaactgcctcgagtacccaccagaccaagaaggcctgcggcagagccgaggacgctgggtcctcctctctgggacacaggggtactcacgaaaactgggccgcgtggtttggtgaaggtttgcaacggcggggactcaccttcattctcttccttcactttcccccacaccctacaacaggtcggacccacaaaagacttcagttatcatcacaaacatgagccaaaagcacatacctaccccatcccccacccccacacacacacacacacacacacacatgcacacaacacatacacacacacgcacagaggtgaacagaaactgaaacattttgtccacaacttcacgggacgtggccagactgggattgcgttccaacctgcaaaacacaaatacattttttaaaatcaagaaaatttaaaaagacaaaaaaaaaagaattcattgataattctaactcagactttaacaatggcagaagtttactatgcgcaaatactgtgaaatgcccgccagtgttacagctttctgttgcagcagataaatgccatgttgggcaactatgtcatagatttctgctcctcctctcttttaatgaaataacgtgaccgttaacgcaagtaactctttatttattgttcaccctttttttccttaaggaaaggactcttccaaatatcatcctatgaacagctcttcagaaagcccattgaaagttaaactatttaacgtgaaatccattaactggaataattgagtttctttatttttacaataaattcactgagtaaataagttggagctggaattctgagctttgtgtttggactgtctggtctgtagctaaaggaaaaagttaggaggggaatatttatttaaatctatcagttcattgcctggtcaggtctctggcctataaacatgcaaaaaaactaattcatgttaaagtccttccagatcctaatttctaaagcaatcaggagagaaagcttttagaatggcacatcatatctcattgatgccaacatggttttgtccatggttctgactttctgtgaaggcaccagcttgcaatatgccatcccatttcaccttgcatgtgagacagcaaacaaaatccacaaatggtgtgaactaatatgctggctgctaccttgcataaattaatgatttgatcacacgggttcttcgtggggttacatctgtgaatagcctgttttacacatgtaaatttgtgccttacaccttgagttgtgtacacttgtaaactctttatgatcaactgttcccccttttgaaataagtgcagatatttatttaaccctcccttccccaccctctgccccacttccagccctctgaaagattggagtcaagcagatggaagaatgcagtggtgatagttgtcatgcgacagcctgagaacgctgggcagcaccacaccctccaattcacactgccttctagttgtgccaactggaaccaccctttggctgtgctgcgaagcatggaccccagtgttgttgtgggtgtgtcaaatcccctttcatcctcaagagctccctgcttcccttagattatttcaatacggtgatatccttatttgctagcagaaaagggactaacgtcccattcctcttttctgctgcgtccactggctagagagcaggcggtgcgcggttgggcagacacctgggaggagtctccaagccatgtgcacagcacacacgtgcagtgcacacaaagaaatgacatggaaatagatgcaggcaggctggtccctgctgtgattaacgagtaactccaagtacaaggccgaccacaatggatgctgcaaaaacgttgactggggcaaaggattttttattttattttttattttgttaattatgtttttaggggatgggaggtggtgtgtgtttttctcctcttggttttcatttgctcaagcacacaaaagggacttttgtttactctatcatgaacaaaggaactgtccacatactgtaaaccatgagcagtgttgttgttgtttttttaaacagtatatttggtggtctctttgtctgcttttatttccagttcgatcttctgggtttagttttgtctttaaaaagaattcaaaaaaaagactgacaatgacagttttgagttggatagtgaaaaagtggagcctccataatcagtgtggttgccttcagacctgagtacttagctgagggtgggtgagagccctttgttccaaaagtccattagttttgctgttgtttaggagtaggtggttgttgttgtttttactttttttttttggcttttgtaatggaatccatgttcacatcctgtgaactctgtctcctgaaaccctgaagtatttcctagaacctgaaatattgttttcttccttgaattttctctagaaatgcagaaattaggaaggtgatgggtctgtatccccctgcccccttctttcccatgcttgactcccaagagtactggcagtgcagcacccatcattgacgtaagcggctgtcttgtccagtgtttgtaggcatcactgcctcagctgttaaggagacctgtgtcaaaacttacatccacattcctacacccccacaacccatcacttctggtgttaaccctaaaatacccacatgtattgagctggtcttctgcatttaagtatttctccccagtttttttccccactgtgtgtggggggagggtccataaacccgagtgtgcctttgctttccacccttgctagacactggtagatgcaacaaactcagatttatatttgttgtaaagttgtaaaaatattgtgatgtcaccaattttccttccatctccacatcccctaacatctgattcacgacttaatgtatgttgtaagaaaagaaaaaagaaaagaaaaaaagggaaaaaagaaaagcaaggaaaaggctctttattacttaaaagtaataaaacctgactgttctatatt

SEQ ID NO: 1625 - protein, 418 aa, Homo sapien [sequence omitted]

SEQ ID NO: 1626 - DNA, 1113 bp, Homo sapien
agcgccgccgcggtctgcggaatgtcaactattcaacatggaggcggaggtcgataagctggaactgatgttccagaaagctgagtctgatctggattacattcaatacaggctggaatatgaaatcaagactaatcatcctgattcagcaagtgagaaaaatccagttacactcttaaaggaattgtcagtgataaagtctcgatatcaaactttgtatgcccgctttaaaccagttgctgttgagcagaaagagagtaagagccgcatttgtgctactgtgaaaaagactatgaatatgatacaaaaactacagaagcaaacagacctggagctgtcaccactgactaaagaagagaaaactgcggcagagcaattcaaatttcacatgccagatttatgaagaaatggacttggaaaggaaattctaacagagaagagcttaattccggagaaatttaggaagatgtcttgttaacccttgatgtctagagattgggggctggtgaagggggtttggcttcaatgactggataatgatatctttcatgagagagattataagaagaagggcagataatatatgaataaagttcagccaaaaggatcaaatgagaataaaacgatttaaatatatgtacacacgcatgcacacacacacttagtcttgtaatttcaggccagaaattctcaacactattttgcatctgttttctttttctaagtcatgataatatagatgttctggtctatcataaaagaatgtttatgtacatttcagtcattcggtatgtggctttgtaaattaaagtataggcaaaacatttgtgttatacatgatatataatttcattttgtaaatgttgattgcacatgtggtcacattattgttgagactgcttttatgtgacctgtagtctcccacagaacctaaagtaataagctggcttttctgtgatagccacgtttgcgtatttctttccctatttcccttgcctgctaatgttgaacagcatgaacttgctttctgatgctgttttagactgtccctgttgtatctcaataatatctttgttttcctacaaaaaaaaaaaaaaaaagaaaaaaaaaaaa

SEQ ID NO: 1627 - protein, 121 aa, Homo sapien
MEAEVDKLELMFQKAESDLDYIQYRLEYEIKTNHPDSASEKNPVTLLKELSVIKSRYQTLYARFKPVAVEQKESKSRICATVKKTMNMIQKLQKQTDLELSPLTKEEKTAAEQFKFHMPDL

SEQ ID NO: 1628 - DNA, 2333 bp, Homo sapien
ggcacgaggcgagtccgagcgccgccatggctctgctgtccgagggcctggacgagctgcccgccgcctgcctgtcgccgtgcgggccgcccaacccgaccgagctgttcagcgagtcacggcgcctggctctggaggagctggtggcgggcggccccgaagccttcgcggccttcctgcgacgcgagcgcctggctcgtttcctgaaccccgatgaggtgcacgccattctgcgcgcggcggagaggccgggagaggagggcgcggcggcggcggcggcggccgaggactcgttcggctcctcgcacgactgctcttcgggcacctacttccccgagcagtcggacctggagccaccgctgttggagcttggctggcccgccttctaccagggcgcctaccgcggcgccacgcgtgtcgagacgcacttccagccccgcggcgctggcgaaggtggcccctacggctgcaaggacgctctgcgccagcagctccgctcggcgcgagaggtgattgcagtggtcatggacgtgttcacagacatcgacatcttcagagacctgcaagaaatatgcaggaaacagggagttgctgtgtatatccttctggaccaggctctcctctctcaatttttggatatgtgcatggatctgaaagttcatcctgaacaggaaaagttaatgacagttcggactatcacaggaaatatctactatgcaaggtcaggaactaagattattgggaaggttcacgaaaagttcacgttgattgatggcatccgcgtggcaacaggctcctacagttttacatggacggatggcaaattaaacagcagtaacttggtaattctgtctggccaagtggttgaacactttgatctggagttccgaatcctgtatgcccagtccaagcccatcagccccaaactcctgtctcacttccagagcagcaacaagtttgatcacctcaccaaccgaaaaccacagtccaaggagctcaccctgggcaacctgctgcggatgcggctggctaggctgtcaagtactcccaggaaggcggacctggacccagagatgcccgcagagggcaaggcagagcgcaagccccatgactgtgagtcctctactgttagtgaggaagactacttcagcagccacagggacgagctccagagcagaaaggccattgacgctgccactcaaacagagccaggagaggagatgccagggctgagtgtgagtgaggtgggaacacaaaccagcatcaccacagcatgtgctggtacccagactgcagtcatcaccaggatagcaagctctcaaaccacgatttggtccagatcgaccactactcagactgacatggatgagaacattctctttcctcgaggaactcaatctacagaagggtcaccagtctcaaaaatgtctgtatcgagatcttccagtttgaagtcttcctcctctgtgtcttcccaaggctctgtggcaagctccactggttctcccgcttccatcagaaccactgacttccacaatcctggctatcccaagtacctgggcaccccccacctggaactgtacttgagtgactcacttagaaacttgaacaaagagcggcaattccacttcgctggtatcaggtcccggctcaaccacatgctggctatgctgtcaaggagaacactctttactgaaaaccaccttggccttcattctggcaatttcagcagagttaatttgcttgctgttagagatgtagcactttatccttcctatcagtaactgctccgtgttcagactcctggtttcttccaggcttacagtggacatcatcagcttcctgctttaaaaaatatcttatgtccctaattgcctttcttttacctgactttgtcacctttgttgtctttgaattctttaggctgcatattattttacatgctttgttttgtcatgtatataccaggtattggttttatggtttaaacactatggatacaggggtttgttttgcacaattttaatagtcatgcactacataatgatgttttggtcgatgacagaccacgtatatgttggcagtctcataagattataatactgtatttttactataccttttctatgtttagatacaaataccattatgttacagttgcctacagtattcagtgcagtaacatgatgtacaggtttgtagcctgttttgcatttttcttaggttgtatgctcttctgttttaaaggtttgaatcaccagcatttttgtgatcaaaatcctatttagaaaaaataaaactactttctgtttaaaaaaaaaaaaaaaaaaaaa

SEQ ID NO: 1629 - protein, 593 aa, Homo sapien
HEASPSAAMALLSEGLDELPAACLSPCGPPNPTELFSESRRLALEELVAGGPEAFAAFLRRERLARFLNPDEVHAILRAAERPGEEGAAAAAAAEDSFGSSHDCSSGTYFPEQSDLEPPLLELGWPAFYQGAYRGATRVETHFQPRGAGEGGPYGCKDALRQQLRSAREVIAVVMDVFTDIDIFRDLQEICRKQGVAVYILLDQALLSQFLDMCMDLKVHPEQEKLMTVRTITGNIYYARSGTKIIGKVHEKFTLIDGIRVATGSYSFTWTDGKLNSSNLVILSGQVVEHFDLEFRILYAQSKPISPKLLSHFQSSNKFDHLTNRKPQSKELTLGNLLRMRLARLSSTPRKADLDPEMPAEGKAERKPHDCESSTVSEEDYFSSHRDELQSRKAIDAATQTEPGEEMPGLSVSEVGTQTSITTACAGTQTAVITRIASSQTTIWSRSTTTQTDMDENILFPRGTQSTEGSPVSKMSVSRSSSLKSSSSVSSQGSVASSTGSPASIRTTDFHNPGYPKYLGTPHLELYLSDSLRNLNKERQFHFAGIRSRLNHMLAMLSRRTLFTENHLGLHSGNFSRVNLLAVRDVALYPSYQ

SEQ ID NO: 1630 - DNA, 3183 bp, Homo sapien
gtcggtttgagatcatcggcttaaaagtatcctaggatggtaatgacccagaagtatttccagttgtctagtggtgtggtatgcaggaatgagaagtgttttctttccatttcctgttggacaggtggcaatcttagcagagccactatttggagttgataactaaagatgcaaataacatgactatgccttctggtcatcctaggactatttggagttctccaaaaccttgtaagaggcatgtcaggcatgcagtaaaagcatctacaacttcagctgggcactggcagcataggtctcatcttggaccatacagtcccactttatagaagagagtggaagttctccaaaacaatatccacaacaaagtctgacctcactctgagggagatgggaagtgggaggaagaaggactaaccagctccctggagtaagaggaatttgctttccctgtctgcccaccaggggctatatgtgccacctttcaggttggggccaaggaagtgatgtcagtgtgacagaagggagagttagacctccagacgtcagcctccctcccatggggtacattttcaatctgagtgttgttgccttagctgtgttggtattagcttgattggttggtccgctggttatgaggtgtagggaggcagtttttgtttagtttttaggactttgcctcttcctttgtccttagcataatttctaggcagagcatccacgaagtcggttttcattgccagctcaagagcgacaatcatttacgagttcctatgttatgttaggtgccttatgtatattatcccaaatccactgcatggtttaaatacaggcactggaatataaatgaaaaaggtcattacagtcactgactttctgcaggaccttaaacatttctctttccacaagtttccccttaatcatgtgtcaaacctctcttcctgacgggaatgttgtgctataatgaatctgcataacgcttgggattctaggaggaaggaaggttccatggacatgtaagtacagcatattcccctcagtcttctaggagggcagagtgaatcccagaactggtaagattgggaatctgagcattgccactttaatcttagaatatttatcattttgacacatcctgttttttagagaggaaaacaaacacagtttctgcattggtagtgtaaagcataccttgttaggaacgtgttttgtaagacacatttgggttgtcattctagagcatgtcaaactttgtacttcaaaatatatttagtatgattgttagtggtaacatatatcaaggctttgaattaactgttttatttaattttcacaagaagcacttattttagccataggaaaaccaatctgagctacaaatagttctttaaaataagcccaggttatttagctattctagaaagtgccgacttctttcaagaagcaggcattgtaggacagctgagaattatcacatagcctaaattctagcctggcagcaagagtcacatctgagatgtccaaaaaaaacaaaaaaaaacacctgatctacattgaaagggggtagactaacgtatgtgagaccattttcctatttgcagttacaaggttaaagaactttgaaggtcattcggctgctaagaggcatgtcgaacactctgtgtggctctttcacagtaaaccctcctaagagcagaagacacatggctgttagtgtctgcgtttagatttaatttctcaaataaaggcccttggctgcgtatcatttcatccagttataaactagggctcctgcaagcacccccattctaagggtgaattattgaaatcagttgctatttgatgagtcacaactggcccagcaggcagggcatttgaagtcatggtcatcaaaaagaaatgattgttttttgaaaagctaaatgcttaaaatgcttctagagggaagtcgtggggcgtgtgctcattctctttaaaatcagggttgttgagtttgtttttaaacatttttataagttcatgagaaaaaatatataaattctaagaaccaacactgtattcccagaaacatgaccctcgctggtcttgggtccacatatcattggactctgggggacacaaagatgcctgtgacactttggtgttgccgagttagtcaacaattattctgggaaaaagcagaattgaattcttctctagatgtcctaccagggttggccaagggccacaaagcaggctaataaattcccacaggatccagacaccaggcaaaattgctctaagaagccagttactgtcatccctctatggttctagaaaaaatagtacaaaaatgacaggtcatcctatgagcgtcatgccaatgaaaccccatcttctggagaagcccttgaatcagaattatcttttttcttgatgtcgtcagatgcagccagtttcttaatttttttaaaaactgtatgtttctgtggtatgtatatttgtacacctaactacctggcacttggaaatcacagcactactcagaggcaattgaataaagagaaatttaattttaaatatcaagtcctgtcaaacatttctcaaacttctgattttatcaaaggtttgccagccaataaagtgcatcccaagtatacaggggagaaagctagactcctacagggtcctagagtttaagtaatttttttgttattaatataggtaataatttttctaatttttattttttggttccaaatgtaaagctccttgtgtttacctctgtttatgtcattcttgacatgtttatctaaattatgtgtgctctgtgacaggtgaaatgtaaatctgggatccatagtcaagatatcataaggacctacttcccagcctacctttcttcctctacctgataatgataatactcaaaataacaacattcaaaggaaacacaaagaaatcctgctttcacatctcctatttcttgggctccttaataactactgatggtttgttcatgaaaaaaaaatttttaaatcaaaagattgtacttggccctgagttgaaaaaatttcaaaaatcaaaagtttgtacttggccctgagttgaaaaaaaaaattcacattctaagaataaacagaaaaatgttcttcttggaagtaaataacaaataaaggcttgaaaaataacaaaaagaaccaa

SEQ ID NO: 1631 - protein, 10 aa, Homo sapien
RFEIIGLKVS

SEQ ID NO: 1632 - DNA, 6512 bp, Homo sapien
agcgacgcaaggtcggctgcggcggcggcccgagggcgcccgtgtgcccagtgcgcggcggggacggccgcgagctcgctggagggctccccagaataatccagaagtcgattccatcatggcagaactcaaggtggaggcgccggccagcgtagactggcagaaacgctgcctgaccctggaaactcagcttttccggttccgcctacaggccagcaagataagggagctgctggctgacaagatgcaggagctggagcagaggctgctggaggcagagcagagagcagagaacgctgagacccaggtgggtgtcatggaagagaaggtaaaactatccaatctgaagaatgtggactctgaggggagcctgcaccggaaataccaagaattgctgaaagccataaagggcaaagatgagctcatcagccagctagaggctcagctggagaagcagaagcagatgagggcagaggaagcaaaaactgttcaagaaaaagctgcaaagatcaaggaatgggtgacactcaagttggcaaagcttgagatggagaatcagcatctgaaaagccataatcagcgcctggtggagcaggtgggatcccttcaagatgcgctagaagctattcagatagctccttcacggaagctgctggtgcccccctacggagctgcagagcaggattctgtcccttcagagccgggaatccagcctatgggccaggacagtggctcccaggcccagggtctgaaggcagctgtgcttgcaccttccccaggtgccctgcagagcaaggactctgtttctgaagcagcaagccccttggaggattctagttccagcacggtccattctggggaaacagtagaggccaagccccttcaacctcatctgggaagagagagccctccccaccagccatgcatgaagcttcttaccttcagatgtagttcagcttcctggggtgagggtctggttactgctcagagagggatgctccctgggacaaagacctctgccagggaaggtggtcctggcagcagtctgaccctaccaaaggtgcgggctcctggcaccccgcgggacagcatccagttggccaaaaggcaccacagccagccccaggtgggccatgggcactttggccgtgtggtaaacattgagactgaggccttctcagccctccacccctctggccttcctgagctggagtcccgagctaggtcccgggaggaaccagagaagatggagatggaggagccacccccagcagggaagaatgaggaaagagagagcccaaaggcccttggagctgagctggaggaagtggagctgggtaacaagccacctacacccccgctgcaccagttttcatcctgggagagccggatctatgctgtggccacatcgggcatgcggctctcagatatgtctcccagaagtaatactgcatgctgcgcttcaagccctcctgcccttgtttcccctgggtctttctctggcctggtctacaagaatgtcactgtgcctgtctacacagcactgaaggggagagctacacagatcagcaacatgccctttatggacgagtcctctgggtctgacgatgactgcagctctcaggcgagtttccgaatctcggtcccctcctctgagtccaggaagaccagcggactaggcagcccccgggccatcaagagaggcgtctccatgtcctcactgagctccgagggtgactacgccatccccccggacgcctgctcactggacagtgactactcagagcctgagcacaaactgcagcgcacctcatcctactccaccgacgggctgggcctgggcggggagtcactggagaagtcgggctacctgctgaaaatggggagccaggtgaagacgtggaagaggcgctggtttgtcctgagacagggacagattatgtactacaagtccccgagtgatgtcatccggaaacctcaaggccaagtggatctgaactcccgctgccaaattgttcgaggggagggttcacagacgtttcagctcatctctgagaagaaaacctactacctgacggccgattcacccagcctgctggaggagtggatccgagtactccagagcctgctgaaggtgcaggccaccgggcctccagctctgcttcggggtggcaccaagcccaccgtgaagggctggctgaccaaggtaaagcatggccactccaaggtggtctggtgcgctcttgttgggaaaatcttctactactatcggagccatgaggacaagcgacccctgggctgcctgcctgtgcgggatgcgcacatagaggaagtagatcgatcctgtgactcagacgaggactatgaggctggaggaaccagacggttgctttcctcccactgcaccctggtgatccaccccacagagcacagccccacctacctcctcattggcaccaagcatgaaaaggatacgtggctctaccacctcacagtggctgcaggtggcagcagtgccaaggtgggcactgcctatgagcagctcattggaaaactgatggatggtgaaggagatccagattcgccgctctggaggcaccccatgctgtgctacagcaaagacggcctatacgcctccctcaccaccctgccctctgaggccttgcagacggaggccctcaagctcttcaagtcctgccagctcttcatcaacgtgccggtggaagctgcctcggtggactaccatgtgtccctggcccagaccgcactgcaggtctgcctggttcaccccgagctgcagagtgagatctactgccaactcatgaagcagaccagctgccgcccacctcagaagtactccctcatgcagtgctggcagctcctcgctctgtgtgctccacttttcctgcctcagcatcacttcctctggtatgtcaagcagcagctccaacgccatgcagatcccagaagtgaaactggccagtatgccacctactgccagcgggcagtggagcggaccctgcggaccggggagcgggaagccaggccatcgcgcatggaagtggtgtccatcctgctgcgtaaccccttccaccactccttgcccttcagcatccccgtgcactttaccaacgggacttaccatgtggttggttttgacggctcttccacggttgatgagttcctccagcggctgaaccaggagataggcatgagaaagccatcccactctggctttgccctcttcacggacgatccctcgggcagggacctggagcactgcctgcagggaagtgtcaagatctgtgatgccatctccaagtgggaacaagccatgaaggagctgcaccccggaaagtctgagggtgggacacgcgtcgtgaagctgatgtacaagaacaggctgtactttcgcagtcaagtcaaaggggagacggaccgagaacggctgctccttgcctctcaaaccagtagagagatagtggcagggaggtttcctatcaacaaggaattggctcttgagatggctgccctgatggcccaggtagaatatggggacttggagaagcctgccctgccaggccctggaggcacatcccctgccaaggctcagcatcttctccagcaggtcctagacaggttccaccccaggcgctatagacatggggcccccgctgaacagctgaggcacctggcagatatgttgaccacaaaatgggcaacattgcaaggatgctcccctcctgagtgcatccgcatctacctgaccgtggccaggaaatggcctttctttggtgctaaactttttgctgctcagcctgcccagctgtcttccaaggagaacgctctggtgtggattgctgtgaatgaggatggcgtcagcatcctggaccacaacactatgcaagtgcacatcacttacccctactcttcagtgacaacgtttggtggctgcagggatgacttcatgcttgtgattagatctatcccagacaagagctctggaaaaagccacattgagaagttgatcttccggatggctgctcccaagattgcagaagccaccttcatcatggccagctatatgaaccattgcactacaactgtgaacccccccaccaacccacccggagcctgccagctgtgggaactggatggacgacagttcttttcttctgtttcctgtgctaccaaggggccaacgttgctgtgaatatttctcctacccgattccccaccaccactagtgcctctggatttagagatatatatcctagggtatgatactactgtgacgggtctaacagcccccggctactcttgttctgtgaaatgtgtattttagtctctgtgaagcctttactctctaggtgccttataatgtttcagggctcaactttttaaaatccagacccagtgttaaaaccatttattccttttttcataagaataatgactccagatgctacctgattctagacatagacagggatgatccactgttactgagggcatcagtgctataagttaaggctttctgcactggtactctcaaggaagctaattttctttctggggggggcgggggacacagtgtcactatgtcacccagtccacagggttcaagcaattctcctgcctcagccttcggagtagctgggattacaggtgtgcgccaccatgcccggctaatttttgtatttttagtagagacggggtttcaccatgttggccaggctggtctcgaactcctgacctcaggtgatctgcccactttggcctcccaaagtgctgggattacaggcatgagccatcgcccagcccagaagctaattttttaatattgtatatggtcttatttatacttgaagttttgtgaacgtcgctaaacaggataggactaaaatttccaattctcctacactctgtcagaagcctagaactcactaaactgggctgcctttcccaaatgggaaaggtgctgacagagttggagaaaaaagaatagactcatttttccccattattggtatgtaggcattggtacagccccttctggggcagtctttgcaggataacatgctatacctgctaagattcaagctgttttcctcacactggactttaggccaaacccagtaccacgcaatgtgcaagcaagggcaggaggtaggtccaatctgacccctccctgtctcattttaatgactggacagcgctcggtgaaggctgtgttcactgtagtgggccatcatttgtttccttcttcttgtaaaagaccaagcaaatgcactctgctttttgctgctgtaagaccaccaaaaatgagtcagaaacacagaagactatttcaggcatgtgggcctggatatgctccttgagacttctggcaaacttctgctgggaattagtttgagggtgagggtacatatgtgacatttgccctagcctaagagtagcaggtaaaaaaaagtttctttcatcctttgccttactgataataccataatccccctcaattcagaccttctgattgagtgcagaggagactagacagtctcctctagacaggttgtagacacaccctcccctaacaaaaacaaaacgaaagagttcatactctgattttccaacatctaggaaactgagttttatttcctagctctaaggcagccttactatatgtcagtaaagtgctgaaaactgtatatttagcagtagcacccaaaaccaagcctttaaccccaacaatgtgtgtatcttttgcacagcaaaaactgcgaggccagaactagtttatctgaacacctcagctgctgtaagcttctcctctctcaccccgtaaactgacaagcatgatgaaaaaagaagcacatccaagtttctgcctcttttaaatgtacttgactttgcaaggcaagtagttttacagccatttctgttcacacttttcaccccacaacttggggatctagctgagacatttctacctcgaacaagtcacatgtaccacaggttcctgaataattcctgcagggctggtgacagacataacagctctggttttataatatcttgggtatctctaaggccaataaggataacattatctacccagagagtttagaagaaaagtaggagtccaaaggaagagtaaacaagaatggagctgtgttcacactgaatttggggtcaatctatttcccccaccctctctcctccccaacccttcaggaaccctttagtttattaatcttatacagaagaaactaacttagaaacaaaggattcaatatttgcttatttattctttgttaacatgagagtcccatgtctgaaaaccaaagtccaatttctgtctggccttttgtctcatccttcttggcaaaagtagcttttgaactgatataaaaaaaaatgctgagtaacagaaaagtattaatgtgcttgacaccatgactgaaatactatgatcttgtttgtcaataaaaagcagctatctgtgaaccagg

SEQ ID NO: 1633 - protein, 1403 aa, Homo sapien
ATQGRLRRRPEGARVPSARRGRPRARWRAPQNNPEVDSIMAELKVEAPASVDWQKRCLTLETQLFRFRLQASKIRELLADKMQELEQRLLEAEQRAENAETQVGVMEEKVKLSNLKNVDSEGSLHRKYQELLKAIKGKDELISQLEAQLEKQKQMRAEEAKTVQEKAAKIKEWVTLKLAKLEMENQHLKSHNQRLVEQVGSLQDALEAIQIAPSRKLLVPPYGAAEQDSVPSEPGIQPMGQDSGSQAQGLKAAVLAPSPGALQSKDSVSEAASPLEDSSSSTVHSGETVEAKPLQPHLGRESPPHQPCMKLLTFRCSSASWGEGLVTAQRGMLPGTKTSAREGGPGSSLTLPKVRAPGTPRDSIQLAKRHHSQPQVGHGHFGRVVNIETEAFSALHPSGLPELESRARSREEPEKMEMEEPPPAGKNEERESPKALGAELEEVELGNKPPTPPLHQFSSWESRIYAVATSGMRLSDMSPRSNTACCASSPPALVSPGSFSGLVYKNVTVPVYTALKGRATQISNMPFMDESSGSDDDCSSQASFRISVPSSESRKTSGLGSPRAIKRGVSMSSLSSEGDYAIPPDACSLDSDYSEPEHKLQRTSSYSTDGLGLGGESLEKSGYLLKMGSQVKTWKRRWFVLRQGQIMYYKSPSDVIRKPQGQVDLNSRCQIVRGEGSQTFQLISEKKTYYLTADSPSLLEEWIRVLQSLLKVQATGPPALLRGGTKPTVKGWLTKVKHGHSKVVWCALVGKIFYYYRSHEDKRPLGCLPVRDAHIEEVDRSCDSDEDYEAGGTRRLLSSHCTLVIHPTEHSPTYLLIGTKHEKDTWLYHLTVAAGGSSAKVGTAYEQLIGKLMDGEGDPDSPLWRHPMLCYSKDGLYASLTTLPSEALQTEALKLFKSCQLFINVPVEAASVDYHVSLAQTALQVCLVHPELQSEIYCQLMKQTSCRPPQKYSLMQCWQLLALCAPLFLPQHHFLWYVKQQLQRHADPRSETGQYATYCQRAVERTLRTGEREARPSRMEVVSILLRNPFHHSLPFSIPVHFTNGTYHVVGFDGSSTVDEFLQRLNQEIGMRKPSHSGFALFTDDPSGRDLEHCLQGSVKICDAISKWEQAMKELHPGKSEGGTRVVKLMYKNRLYFRSQVKGETDRERLLLASQTSREIVAGRFPINKELALEMAALMAQVEYGDLEKPALPGPGGTSPAKAQHLLQQVLDRFHPRRYRHGAPAEQLRHLADMLTTKWATLQGCSPPECIRIYLTVARKWPFFGAKLFAAQPAQLSSKENALVWIAVNEDGVSILDHNTMQVHITYPYSSVTTFGGCRDDFMLVIRSIPDKSSGKSHIEKLIFRMAAPKIAEATFIMASYMNHCTTTVNPPTNPPGACQLWELDGRQFFSSVSCATKGPTLL

SEQ ID NO: 1634 - DNA, 7300 bp, Homo sapien
gcacgagccccgggctgccggcgcgggcgccgcggcacgtccacaggctgggtcgcgaggtggcgatcgctgagaggcaggagggccgaggcgggcctgggaggcggcccggaggtggggcgccgctggggccggcccgcacgggcttcatctgagggcgcacggcccgcgaccgagcgtgcggactggcctcccaagcgtggggcgacaagctgccggagctgcaatgggccgcggctggggattcttgtttggcctcctgggcgccgtgtggctgctcagctcgggccacggagaggagcagcccccggagacagcggcacagaggtgcttctgccaggttagtggttacttggatgattgtacctgtgatgttgaaaccattgatagatttaataactacaggcttttcccaagactacaaaaacttcttgaaagtgactactttaggtattacaaggtaaacctgaagaggccgtgtcctttctggaatgacatcagccagtgtggaagaagggactgtgctgtcaaaccatgtcaatctgatgaagttcctgatggaattaaatctgcgagctacaagtattctgaagaagccaataatctcattgaagaatgtgaacaagctgaacgacttggagcagtggatgaatctctgagtgaggaaacacagaaggctgttcttcagtggaccaagcatgatgattcttcagataacttctgtgaagctgatgacattcagtcccctgaagctgaatatgtagatttgcttcttaatcctgagcgctacactggttacaagggaccagatgcttggaaaatatggaatgtcatctacgaagaaaactgttttaagccacagacaattaaaagacctttaaatcctttggcttctggtcaagggacaagtgaagagaacactttttacagttggctagaaggtctctgtgtagaaaaaagagcattctacagacttatatctggcctacatgcaagcattaatgtgcatttgagtgcaagatatcttttacaagagacctggttagaaaagaaatggggacacaacattacagaatttcaacagcgatttgatggaattttgactgaaggagaaggtccaagaaggcttaagaacttgtattttctctacttaatagaactaagggctttatccaaagtgttaccattcttcgagcgcccagattttcaactctttactggaaataaaattcaggatgaggaaaacaaaatgttacttctggaaatacttcatgaaatcaagtcatttcctttgcattttgatgagaattcattttttgctggggataaaaaagaagcacacaaactaaaggaggactttcgactgcattttagaaatatttcaagaattatggattgtgttggttgttttaaatgtcgtctgtggggaaagcttcagactcagggtttgggcactgctctgaagatcttattttctgagaaattgatagcaaatatgccagaaagtggacctagttatgaattccatctaaccagacaagaaatagtatcattattcaacgcatttggaagaatttctacaagtgtgaaagaattagaaaacttcaggaacttgttacagaatattcattaaagaaaacaagctgatatgtgcctgtttctggacaatggaggcgaaagagtggaatttcattcaaaggcataatagcaatgacagtcttaagccaaacattttatataaagttgcttttgtaaaggagaattatattgttttaagtaaacacatttttaaaaattgtgttaagtctatgtataatactactgtgagtaaaagtaatactttaataatgtggtacaaattttaaagtttaatattgaataaaaggaggattatcaaattcatatatgataaaagtgaatgttctaagtctctcaaactagcgttttatgtaataatatgtaatataaataaaactatggtaaatgtgacaagcatttaataggaaaatgctaaggaggcctcataaatgacccataattaccaacgtagaatttttcagtacatttagggttgctggatttagcaaataaaaataaagattgcccagttagatttgaatttcagataaacaattagttttttaatattttacatggaatatttggaaaatacttatactaaaaaattatttgtttgaaattcacatttaactgggagtcttgtattttatctggcaatcctaaaatacattggtatgaaacaaatcacttttagaagtatattgctattttgattgggttgtttttgtgtgtagaaacgtacaataacaactcaaaggcacaggagatttctaaacattgtgaaaagttgaatagattatatatttattctcataatactttcactaatactaaataaaatttggggaacactttttatttttatataatttccaatttacagaaaagtttcaaaaatagtacaaagagctctcttacccagattcactaattgttcatacgtgctttatctttcatgctttctctgtacacacacacacacacacaaatttttcctcaatcatttgaaagtcagttataggcatcatgccccttaaaccctaaatacttcagtgtgtaatactgaataattactaaaaatgattttctcagaaaaaaaaactcccacaattctggaactataatactgtaagccttagaataaataatactttcaagttccaatctaaagttctttttgagttttgttgcccgttttatgcttgatgtgtatagtaatagggtaggctatttattttattaaaattttttttagagacaaggttttgctgtgttgcccaagctggaacttgaacgactgggctgaagtgatcttcccacctcagcctcccaagtagctgggaatacaggtgtctgccaccatacccagtttcatttttgttttttatacccgaagttcatttcctttgtctccctaaaactgaactgtaattttgggaggttttcattagtggaagctcttcatttataaagctatttgaaggggtttaggaatttatatcacatggtaattgtagagaaaaagaagctatatacctcaaaatcgtgccctctttacatatgtcttatcaggtataacatgttgaaatgtcacattagtagtaaagtggggtttatttatatagtggttaagaaatgtcagtttacactgctgtatacttcttcttctgtgtccctaaggcctggtacagtgccaagcacatacttggtatccaataaatatttgttggatgaatgtatgcatatgtattcagtatattttaaatgaataatcacagaagtaagtttaataatttgtcctatttttctctgtcacttcctttttctctaaggcaggaaaggaaagacattaaaccattaattaagtcaatcctcttggagactcaaaagactatgaagtgatcactctatataaaatataaatacagtgtgggttcaaatggccattttttgtgtgtccctctctctcatcttatgcttcccttcctttttttatttttattttttggagacggagtcttgctgtgtcgcccaggttggagtgcagtggcgtgatcttagctcactgcaagctctgccttccaggttcacgccattcttctgcctcagccccctgagtagctgggactacaggcgcccgccaccacgcccggctaatttttttttttttttttttgtatttttagtagaggcagtgtttcaccgtgttagccaggatggtcttgatctcctgacctcgtgatccacccacctcgacctcccaaagtgctgggattacaggcgtgagccaccacgcccggcctcttttttttttagctgccaatctttttgaaggaatattcttacctctactttgtcaccttctactggctccttaactaaaatctgccatttggctctctggttaacagtcccttcctgtaaagtctaaaatcttaattctaaatccacagtttaattcacaagctagtacttgactttttttctgtatttgacatttttgacaacccctactttaaagatttattcccttgacttcttacattttgctcactcctgaaccaccccccaccttttggcctcttcatttattccttaaatgttattcctcagacctccattttttttttctctcttaatcacaacaccacttctcacgcttgggtaattttaattcagcagttcctaaatccttatctttagccagactcctcaatccatctgcctgttgcacttttcttggttgtcccagagacacctgtgtgtgtcttaaaacattcattctctgcaaaacctactctaatgcctgtgtcccttactttggttaattttagaaccattatattctaagttttctaggctcattcctctcctccaccttcccctatcatttagtgtctaagttttactgattttatctccacctctctgatacatcactctttcatcttcattgctattattaataaatacctacagtactaacctgcctcctatacctagctggtctcctctctgttgctcaatgttaccacagcaggctttctagaagcactctgacagtgttactccctaatatccttcagtgacttcaggaactttcaggagaaagccaaactcctctgtttggtgtacaaggtcttctgatgtgtttcctccaccgaatgttctggtgaaacagacttacacttcttcagaagccacatttggccaggcctcccgccttggtaaatgctgtactctttgcatcaagtatgctagtcatccttccccacttggaaaattcctatgcatcttgcaggcctgacataagcatttcctctgtgaaacctcctttgctccactcaaggagagtcatctaacttccactttcgtgtcaccactgtaattacaacctacctctattgtatgtcacttaaatcgtactgtattgttttatttttcaaaagtctttactagaatgtgagctccttaagggcaggaaaaggaacctttttattttttgcatctccatagcatagtttttggcatatgaatgtttaataaatgtttgttgaataaattgattttaaagtgacatctttattatattagaggtcctacctatattccaaatactttcactcccttcactttacagcaagggtcagtagagtcccaaggatttgtagactttagggggtcaataaagctgaaattgtattcaagatttggtgtggtttttggtgggtcatgaaaggggtctattcggggaaaaaaaggaacttctttcatgggaaaaggcagcatcattgaggaatttcttgaataatcaaataataccttcctaggattataaggtagataaatggattcctgtttaagattctgaagggaaggggagaagtgttataaattatttcatacaacaatttttcttagcttaatgtttgaataaataaaaatgttggtaccagtaccatgctgttttggttactgtagccttgtagtatagtttgaagtcaggtagcgtgatgcctccagctttgttcttttggcttaggattgacttggcgatgcgggctcttttttggttccatatgaactttaaagtagttttttccaattctgtgaagaaagacattggtagcttgatggggatggcattgaatctataaattaccttgggcagtatggccattttcatgatattgattcttcctacccatgagcatggaatgttcttccatttgtttggatcctcttttatttcattgagcagtggtttgtagttctccttgaagaggtccagagatatagatcaatggaacagaacagagccctcagaaataacgccgcatatctacaactatctgatctttgacaaacctgagaaaaacaagcaatgggaaaaggattccctatttaataaatggtgctgggaaaactggctagccatatgtagaaagctgaaaatggctcccttccttacaccttatacaaaaattaattcaagatggattaaagacttaaacgttagacccaaaaccataaaaaccctagaagaaaacctaggcattaccattcaggacataggcatgggcaaggacttcatgtctaaaacaccaaaagcaatggcaacaaaagccaaaattgacaaatgggatctaattaaactaaagagcttctgcacagcaaaagaaactaccatcagagtgaacaggcaacctacaaaatgggagaaaattttcgcaacctactcatctgacaaaggctaatatccagaatctacaatgaactcaaacaaatttacaagaaaaaaacaaacaaccccatcaaaaagtgggtgaaggacatgaacagacacttctcaaaagaagacatttatgcagccaaaaaacacatgaaaaaatgctcaccatcactggccatcagagaaatgcaaatcaaaaccacaatgagacaccatctcacaccagttagaatggcaatcattaaaaagtcaggaaacaacaggtgctggagaggatgtggagaaataggaacacttttacactgttggtgggactgtaaactagttcaaccattgtggaagtcagtgtggcgattcctcagggatctagaactagaaataccatttgacccagccatcccattactgggtatatacccaaaggactataaatcatgctgctataaagacacatgcacacgtacatttaatgcggcactatccacaatagcaaagacttggaagcaacccaaatgtccaacaatgatagactggattaagaaaatgtggcacatatacaccatggaatactatgcagccataaaaaatgatgagttcatgtcctttgtagggacatggatgaaattggaaataatcattctcagtaaactatcgcaagaacaaaaaaccaaacactgcatgttctcactcataggtgggaattgaacaatgagaacacatggacacaggaaggggaacatcacactctggggactgttgtggggtggggggaggggggagggatagctttaggagatatacctaatgctaaatgatgagttaatgggtgcagcacaccagcatggcacatgtatacatatgtaactaacctgcacattgtgcacatgtaccctaaaacttaaagtattaaaaaaaaacccttaaaaaataaaaataaaaatgttgtactatctaataacgtattggcattttaaactgcatggcact

SEQ ID NO: 1635 - protein, 468 aa, Homo sapien; identical to SEQ ID NO: 1462

SEQ ID NO: 1636 - DNA, 1583 bp, Homo sapien
ggcacgagggagcgcggcgggcggggccgggcggcgggcggggctggcggggcggccgggccatgcagggcgcagagccggctaaaccctgctgagacccggctccgtgcgtccaggggcggctaatgcccctcacgctgtctacgctgctgcaaccgggccgcatctggacggggcgccgcgcggcggagccgacgccgggccacaatgctgcttggagcctctctggtgggggtgctgctgttctccaagctggtgctgaaactgccctggacccaggtgggattctccctgttgttcctctacttgggatctggcggctggcgcttcatccgggtcttcatcaagaccatcaggcctaccttactggtgatgtgctggtgatggacgagctgggctacctgtacttccgagaccgcactggggacacgttccgctggaaaggtgagaacgtgtccaccaccgaggtggaaggcacactcagccgcctgctggacatggctgacgtggccgtgtatggtgtcgaggtgccaggaaccgagggccgggccggaatggctgctgtggccagccccactggcaactgtgacctggagcgctttgctcaggtcttggagaaggaactgcccctgtatgcgcgccccatcttcctgcgcctcctgcctgagctgcacaaaacaggaacctacaagttccagaagacagagctacggaaggagggctttgacccggctattgtgaaagacccgctgttctatctagatgcccagaagggccgctacgtcccgctggaccaagaggcctacagccgcatccaggcaggcgaggagaagctgtgattccccccatccctctgagggccggcggatgctggatccggagccccaggttccgccccagagcggtcctggacaaggccagaccaaagcaagcagggcctggcacctccatcctgaggtgctgcccctccatccaaaactgccaagtgactcattgccttcccaacccttccagaggctttctgtgaaagtctcatgtccaagttccgtcttctgggctgggcaggccctctggttcccaggctgagactgacgggttttctcaggatgatgtcttgggtgagggtagggagaggacaaggggtcaccgagcccttcccagagagcagggagcttataaatggaaccagagcagaagtccccagactcaggaagtcaacagagtgggcagggacagtggtagcatccatctggtggccaaagagaatcgtagccccagagctgcccaagttcactgggctccacccccacctccaggaggggaggagaggacctgacatctgtaggtggcccctgatgccccatctacagcaggaggtcaggaccacgcccctggcctctccccactcccccatcctcctccctgggtggctgcctgattatccctcaggcagggcctctcagtccttgtgggtctgtgtcacctccatctcagtcttggcctggctatgaggggaggaggaatgggagagggggctcaggggccaataaactctgccttgagtcaaaaaaaaaaaaaaaaaa

SEQ ID NO: 1637 - protein, 237 aa, Homo sapien
MPLTLSTLLQPGRIWTGRRAAEPTPGHNAAWSLSGGGAAVLQAGAETALDPGGILPVVPLLGIWRLALHPGLHQDHQAYLTGDVLVMDELGYLYFRDRTGDTFRWKGENVSTTEVEGTLSRLLDMADVAVYGVEVPGTEGRAGMAAVASPTGNCDLERFAQVLEKELPLYARPIFLRLLPELHKTGTYKFQKTELRKEGFDPAIVKDPLFYLDAQKGRYVPLDQEAYSRIQAGEEKL

SEQ ID NO: 1638 - DNA, 1366 bp, Homo sapien
gcgtctcgcagcagccgcccggaccgggcatggtgttgggcgccgggcccgcctcgcctgtctcggggagcccagggtaaaggcagcagtaatgctaacgctagcaagtaaactgaagcgtgacgatggtctcaaagggtcccggacggcagccacagcgtccgactcgactcggagggtttctgtgagagacaaattgcttgttaaagaggttgcagaacttgaagctaatttaccttgtacatgtaaagtgcattttcctgatccaaacaagcttcattgttttcagctaacagtaaccccagatgagggttactaccagggtggaaaatttcagtttgaaactgaagttcccgatgcgtacaacatggtgcctcccaaagtgaaatgcctgaccaagatctggcaccccaacatcacagagacaggggaaatatgtctgagtttattgagagaacattcaattgatggcactggctgggctcccacaagaacattaaaggatgtcgtttggggattaaactctttgtttactgatcttttgaattttgatgatccactgaatattgaagctgcagaacatcatttgcgggacaaggaggacttccggaataaagtggatgactacatcaaacgttatgccagatgataaaaggggacgattgcaggcccatggactgtgttacagtttgtctctaacatgaaacagcaagaggtagccccctctcccgtcctcatgctccctctcagtcccctggattgccccagtcctgtgaccatgttgccctgaagaagaccatcttcatgactgctcattgtagatggagaattcaacataaatacagcaagaaaatgtgtttgggcttctgaagagttgtctgcttaccttaacatgtttacttttttgaacttgtactgtataggctgttggtgaaattcttaagaagttgtaatgaactcaaaattgaggccagagcttgctttcccttttcccaaacaaaattggttttctgcacaagcgatgctaatgatgtgttcagtgtaactcgcagattggcaataagatacccgctacaaactgtgattggatgcaaaatctcttagcttctttcacgaatgttggccctgcctagatgttgtgaagcctcccagaatgcatagagtcattcactgtagatctcttattgaaatgcgtattttatttaatgtaagtatattttggaacagatttgtaatttgtacaattcaatgctttaattattttttctattctcatttagtttgtattttcattgtatagagcagacagaaagatgttgggtcaagcaactattgaagagaaatacaaagaaaaaaaaaaaaaaaa

SEQ ID NO: 1639 - protein, 185 aa, Homo sapien
MLTLASKLKRDDGLKGSRTAATASDSTRRVSVRDKLLVKEVAELEANLPCTCKVHFPDPNKLHCFQLTVTPDEGYYQGGKFQFETEVPDAYNMVPPKVKCLTKIWHPNITETGEICLSLLREHSIDGTGWAPTRTLKDVVWGLNSLFTDLLNFDDPLNIEAAEHHLRDKEDFRNKVDDYIKRYAR

SEQ ID NO: 1640 - DNA, 1936 bp, Homo sapien
aaaaaagaaaaaagaaaaaaagagaaaaaagcgaaataggttatattttaaaaacaatagaaaggcaataagttgcgataagctcttactattgaccaaggttatacaggaaagagactgaagtgtacccttgaataggttttctgtagtcagagttctaaactctaatttgtaacttggactttctaattgcaaatggcaataactattaagttatcagcaataataaatttagcattaaatttgagtacaatgttttgtttttgcactccccatagtgcgtatgtattaagacagtggatagtgtttaggtcctgttaattttctttggaattcaatgtggttgtgaatcaaacttaaggaaggaacgtttaaatagcaatgagatacagaattatgggcctttggaacaagcccgacttcccctaaattctccttagtttgttaataccagtattcagattcctgattcatttatacatctgtttccatatggcagggacattatgatacttaatgaataatgctttgaggagttctgcagttaactttcaagtcttccagatgattgtcaacaacaaaaaaggcttattgaatcccatcttgctatgcaagttttatcagatgatcaaatagtagatctgatacatccccattgtatgtacgacattttcaaaccaagtcttaacttttcaaggacattttagtagctaattcaggggagggggaagaatgatgcaggtttttagattgactgactatttttgagttatggggctcattttgaaagactgctgtccagatcagcttgttgctgcagataatagaaggttcttatgaatccaagttgtatattcacttgtaggataatttaaaaattagattttttttgcatatgagcaaaaaccttttgctggatacaggagaaggttggactttatctacagttatcttttgattacagcaacagctctgggtgagagtagaatttatagagggataatttgtcaagccatagaaagaaaatctaaattaatctagtaagtgtatgacctctcaccattttaagaggtatcagattcatttgcactattaggaatgctagttttgtgcaaaaataatgccttacctgttttttccccacatttaggttgaaaagctttcaaatgttccaagttatgctgaaccaaaaaaaacaaaacaaaaacaaaacaaaaaatattaaaaaaaacccacacaaaaacaaaacacacaaaaataaaaagcccacactttttattcctgcttcgaaatgcaaatggatagagcacggtttctctgacagtataatgatagctttgtgagttagtttcatgtcatgctgggaactctctatgaggtggccataagcagcaaccagcccaaacacccacttgcgttctattagtatggaaccatttgcatttgttttttttaagctttatctttccttgtgcatcctgaccaagaaatatctttgattatgattaatgtattatgtcaaaatgtaggctagttaaacttttgtaaagttgcctggaatgtcatttgttaggttataaacacaagatctaaatgaagggttttatgtgttgtgtacaaatcttattttgaaatggacaaacttgtcattacatttgtaaccttgtacagaggatttttcactatgtgcctagcttggtgtccattcagctaaaattgaaaaaaaaaaaggtgcatgaagagttaaaaatcaaattaaagtatatgtagagatgactattttatattacatgacccaatcctgtatttatttctaccccctttttgaaagtatttataaaactagttgaggacagctgtatttttttgttgaactatttagtagaattgtgcctttttgtctgtatgtgaataaatgctgtacattttgcaatac

SEQ ID NO: 1641 - protein, 39 aa, Homo sapien
KKKKEKKRKKRNRLYFKNNRKAISCDKLLLLTKVIQERD

SEQ ID NO: 1642 - DNA, 5122 bp, Homo sapien
gactggaagaaagtgaaggggagctccggaagaacctggaggagctatccaggtgaagatggaacgggagcagcatcagactgagatcagggatctccaggaccagctctcagaaatgcacgatgaactggacagtgcaaagcgatcggaggacagggagaagggagctctgattgaggagctcttacaggcaaaacaggatcttcaagatctgctgattgccaaagaggggcgagaagacctcttgagaaagcgagagcgtgaactcaccgccctgaagggagccctgaaagaagaggtttccagccatgatcaggagatggacaagctgaaggagcaatatgatgctgagttgcaggccctgagggagagtgtggaagaagcaaccaagaatgtcgaggtcttggcgagcaggagcaacacttcagagcaagaccaggcggggactgaaatgcgcgtgaagcttctgcaggaggagaatgagaagctgcagggaagaagcgaagagctggagcggagagttgctcagcttcaaaggcagatcgaggacctgaaaggcgatgaagccaaggcgaaggaaacgctgaagaagtacgagggagaaatacgacagttagaggaggcccttgtgcacgtcagaaaggaagaaaaagaagctgtgtcagccagaagggccctggagaatgaactggaggctgctcagggaaatctgagtcagactacccaggagcagaagcagttgtctgagaagctcaaagaggagagtgagcagaaggagcagctaagaaggttgaagaacgagatggagaatgagcggtggcacctgggcaaaaccattgagaaactgcagaaggagatggcagacattgttgaggcctcccgtacctcaaccctggagctccagaaccagctggacgagtataaggagaaaaaccgcagggagctcgcagaaatgcaaagacagttgaaggagaaaacgctggaggcagaaaagtcccgactgacagccatgaaaatgcaggatgggatgcgtctgatggaggaagagttacgggactaccagagagctcaggatgaagcactcacaaaaaggcagcttctggagcagacgctgaaggacctggagtatgagctggaagccaagagtcacctcaaagatgaccgcagcaggctggtcaagcagatggaggacaaggtgtctcaactggagatggaactggaagaagagagaaacaactcagatttgctgactgagaggatcagtaggagcagggaacagatggagcagttgaggaatgagctacttcaggagagagctgcgagacaagacttggagtgcgacaagatttccctggagaggcagaacaaggacttaaagagccggattatccacctggaaggttcctacaggtccagcaaagaggggctggttgtgcagatggaggccaggatcgcggagctggaggaccgcctggagagtgaggagagggatcgggccaatcttcagctcagcaaccggcggctggagcggaaagtgaaggagctggtgatgcaggtggatgatgagcacctgtcattgactgatcagaaggaccagctgagcttgcgtttgaaagccatgaagcggcaggtggaggaggctgaggaggaaatcgacagactggaaagttctaaaaagaagctgcagagggagctggaggagcagatggacatgaatgagcatctgcaggggcagctcaactccatgaagaaggacttaagactgaagaagctgccgagtaaagtgctggatgacatggatgacgacgatgacctcagcacggatgggggaagcctctatgaggcgcctgtgagctacacattctccaaggacagcaccgtcgccagccagatctgagtgctctcccgggctgtggaagtacctgtcattcctgcaggagctgcagccacccaaagtgggaggcagggaggggagcatctgtctgccactgagaccaatcacagcctctttgcacagcatgccagctcctcagtgttacattcctcgccagggtctctcagtgggtcttcgacagagagcttttgcagtttaaaatgttgggatgcctgaggaccaggagccaccacccactggggtgttgtgagagatacactttggtaggctgaggcccctgttccacagccactatttgcattgctgtccctgccccctcatcactccccctgccaagacaaagggtccagaaggctaggacttacttaatagcactgtgcagggaggaaaccatgtatagcttgtacatattttaaaccagaccttctcacgaactgctgctgttgggtttggaatgtgatggaggcttggtagggtggctggtttgtaaagttcatgcatctatattgagtattctttttttttttttttgagatggagtttcattcttgttgccgaggctggagtgcaatggcgcaaccttggctcactgcaacctctgcctccctggttcaagtgattctcctgcctcatcctcccaagaagctgagattacggatgaccaccaccactcctggctaattttttgtatttagtagagacggggtttcaccatgttggtcaggctggtcttgaactcctgacctcaggtgatccacctgcctcagcctcccaaagtgctgagattacaggcatgagccaccacgcccagccattgagtattcttttttaaaatatgaagctattagattttaagtgttgaggagcagaggtgagaagagagagagagagagaaagtcaaataaagtcaaagaccagtttggaaaccaaagttggaaaagaagaattgtagtggtcatggacagctaagactgagcatagcagttcacatggtctgggtaaacaagtcactggcacaggggaaagccagaaggttgcttgtgtctgtgactgcagctatggccttgtttgcttagtttatctggaattctgttataatttctgaactgttctgagacctgttcccagtcactgattgcaatttcttttacacaggttgggtagggagagttgtaggtaaggccttaaacaaatgaggccgtttctggaaggatagggctgtgtggtcatgtcccacagcaagcttttgggatcgggggaataagagggtatgggggaaaggttcatagacttaggtgtgagaatgaggtgggaggtgtctggtaaggtcatgggggaagggagatgagagaggagataggcagatgtgggtatggggcccagtgtgagaaggaagacagagaagttcttgaaagctgggggatgtgtgggcaagaggtggattgagcaggatctcagggttatgtcgaggaagggaagaaagaaacagaagtcaggcagaggcgtgtctgtgcaaactggaggactccttccaacttcctggaacaaagcgacatcgccagcagcaggctggcagggagtggttgaggtctgggggccaggccacatggctggagaggaatttcagggagcatagcatcgggaggatgctacatatccagggactccctcctggccttcctgtgtcacttcacaatgtgacagtccccaggcatgcccacaggccaggcccagtcacagctgggcttccacaggtcagaatatgggacaggacatggtcagggagaggaccctgtgagttggtgacatatatgtggcagagatggtagtgctcagctgcttcagcagtgtccccaaccatcccaatagggtgggggcctgtgggccagaggactccatgacagtagccatggagtcccacctgtgccaggtcagagcccacccggcaggtttcagagtggtcagcccagtttaagggtgggagtctggagccagacagccaagccccttccacatctacagggtcactgtcatcctcaccacagccaggggtgattctcacctctgcctgcttatgtggggtgtggccgattcctccctttagtcattcattcatttagcacatatttattgggcatcggtgatgtgtcaggcacagtccttggcacacagaatacagcagtgaattaaacaggcaaaaattcctcccctcctggagctcagtgtcaggaaagggggtgataaatgacaatcaaatcgacatggaggttgagcacctctgtactcagccctctgtctgtccttctgaggacgcaacaagcctggttccctagagctcactttgaccctcaatatgttcataatttccctgctgcttctcccatcgttagacatctgccagtaagcctgctgagagaagcctcagcccactcatacctagagacgctgctggggaaggtcagcacacccaagaactttgggagtgtgtgtctgttttggtttgtgagaaagtagctgcccctcattctggccagttctttccagtagccatggggctggctacaagaagcaaaactgcccatgcaaagagaacacaggtcacttttcaaaacacttgcatcattaccctaaaaataggctgttatgcgttttgacaattgcgctatcctacactctgagggagttggcaacgcatgcggtatagtggagtgggaagagttgagactgaaagttaagagaagggttttcaagtcccggctcatctcaccccagtgactttgacagtgtgctcactctcagagccatggattacctggaacaaagtgcagattagtgcccacggtcctttccaggtataacatgctatcgttctttaattttattatatatacatacttttcttctgttttttgctttaagaactaaccccgatcaagagtattttctttagctagcttaaaaagaaaacatatattttatgtaaaaacacatacatggccaaatgcaatactgaagagacaatcatcctgtatcttttatggtttttcctgcttctgagcgtcgttctacaatgcccgttgacttattccattgcgtctctgctttagggtatggtttggtcgctttggttgtcatgagaaagagacattctccttgcagctacctccatgtgagtgaattcctggataaagcaagatttcctttcaataaacgctgtcacccaatggg

SEQ ID NO: 1643 - protein, 612 aa, Homo sapien
MEREQHQTEIRDLQDQLSEMHDELDSAKRSEDREKGALIEELLQAKQDLQDLLIAKEGREDLLRKRERELTALKGALKEEVSSHDQEMDKLKEQYDAELQALRESVEEATKNVEVLASRSNTSEQDQAGTEMRVKLLQEENEKLQGRSEELERRVAQLQRQIEDLKGDEAKAKETLKKYEGEIRQLEEALVHVRKEEKEAVSARRALENELEAAQGNLSQTTQEQKQLSEKLKEESEQKEQLRRLKNEMENERWHLGKTIEKLQKEMADIVEASRTSTLELQNQLDEYKEKNRRELAEMQRQLKEKTLEAEKSRLTAMKMQDGMRLMEEELRDYQRAQDEALTKRQLLEQTLKDLEYELEAKSHLKDDRSRLVKQMEDKVSQLEMELEEERNNSDLLTERISRSREQMEQLRNELLQERAARQDLECDKISLERQNKDLKSRIIHLEGSYRSSKEGLVVQMEARIAELEDRLESEERDRANLQLSNRRLERKVKELVMQVDDEHLSLTDQKDQLSLRLKAMKRQVEEAEEEIDRLESSKKKLQRELEEQMDMNEHLQGQLNSMKKDLRLKKLPSKVLDDMDDDDDLSTDGGSLYEAPVSYTFSKDSTVASQI

SEQ ID NO: 1644 - DNA, 3736 bp, Homo sapien
aaaatactttgccaaatgaaatagactagtcaatacatctgatgtccataattattggtaactcagttaccttctaactaataggctggttcaggagactctcccagtttataaatggttctcttgggagcctttggaagctgtattaaatctttcagtcttttatttctaattttttctcttaatctaaatagaggccagttatctattttatcagcttttattcttgaagattctcagattatgttttagtcccttttagctttaatagtccttgaaaaatacattactgtataatgtggcaattctgtaacagagacttattacttgaatgaataatcctaaaattttaatattttagctgaagtttgagatttgtggaatgaacaaaagaattagaaactttcatatgttactttgtttcagtcatctgcaaagtatgaagctgtaattctgaaatacacatccaagtgaatgagaattaaaaattttctaaatattaatactaactgggaaaaaaaaactagtgtgaagtttacagttagaagaaacagacccaaagttgccagaaggtaataaataaatgtagttttcactgtaagtaagttattgacgtaagatgctttatttgtaatatatttagattttgaaagttattgagagatgaatgtataaaagctaaattttcttttctgaagcagtgaaacaaaattggggtaacaaggaagctctgttgtggcaaacatgtctatgaggaatattaaaactaagcatactcccacaggctttaaactcaaaccatgaacatttaaattaagttgttccttattttgcctatacccatttttatctttcattgtcgtttttgcttgacagtatggtgacagagtatttttatttggaaagtcctcagcaagatgaattagccaaaagcaataatggttcagattaaacaataaagtggaattgattcaatcccaggctcaactaagaacagtcgctctctggatgtttcattttagacgatagataagttgagatgttgtaatatttatggggggttaagcctgtgtcagttatgggatgaagacttgtagtaccagtaccatcagtggtcatacttttttttaactttttactaaactaatacagttagacatttccactctatcgtgattatatttttatgatgggaaaataaaaacacttccatgtttttataaatagtctctgcaaagatttcagatgttattggtatctcggtttggcagtatctgaaaaattgagattgtctttgaaatgtttgtgctacttttacttaagtaaacccccactgtgcaagacccaggccggcttcagctaataccaaggtttctgtgtgcataatagtttacagagaacttaagagtaaggactgcggattaaaaacaaaactttttttaactttaaaatttttagtttttgttcaaagtacctggtttataaagtcaaattcttttattagttcctttctcgtttaaattgactgatgttgctgatgaagcttaaagtcccaggcacggttgtggcgatatactgataaaattggtgcctagtggtgggaggagctccagtgtcaggacttttattaaaaggcccttgttttcccaaatgccaatctagccacatttagatttcattattcaataaaacagatgaaaaatcatcccataaatgaatgttgaggttaccaaagtacatcacctgctgaggaaggataaatcttcctgctttaagggagccctgtcatctctcctcttaatgcacgtttcccttggtattagtggaagctgtgttcaagatgggaagcctttcctgcagttcttagaaacacctgctttctaaggagagccttttctaggattagcttatgtgtgttttctctaggcgattttttatttcagttaccaatttaattttcaagttgacagatgctgtgtaaagtctctcataatgagagtagtccattaaattgttgaaagttgcactgcttttcatctttcaggtacctgaaatgagtgacatcaggtatttggaaggagtaagatcataaactgtattcattttcttccttgtacaaagtgatgacttctaatgcttatatctcaaggtattttttaaaaaagcaacggtccctaatagagtaaaatttggttttggtccaagttcccaataatgtatttaatgtttctgttgtttactggtgcctcccgttgcatcaggtagagattgcctgcctctttgtagggcagccttgtggcaccttatgtccaacttggaggatagtatatggcttctttgtgcctctactatcttttcaaaagccattttataaaaatcctaggtagcctattttaatatttaaatatatatatttgtgaaagaacttttagaacagaccttttctttttactttaaaattcctgtatttccatttttaagagtaaatttaatctccaggatttagaagtgtctttccagagaagcataatgagaaagtcagactgaggtaataagaccagaattaagtgatagaagaaactgttgtttggttaaaggacacagatttgaaggaaaaaattttgatgtaacaattttttaaataaaattttgtttttctgtaatgtcatatttgctgctacagtagctcaatattttacagggctaacataaagctggctccatttaaaaactggagtacttcctagtgcagccagcctaggcggaaactgtacaccatggtcttccagatgggtgactgatggctttgggtagctgatgcatgctttaatatttgcctatagcccggcagcaaggaagtcggggcggggggacttttttaccctgccagttatagcattgtgattctttctgggcactggcattttgtgaaactctcaagggaaggtgatgcaggggagaaaatgtgaattaaattacatagatgggtgtttttatgtcttctacccctttcctagaattagtacaactcttaactgtgccagtccccagttcaccagctttgtatccagtcgtcatctcattcaagtatggctttacttggtgacactggccatagctaagttaacttggcatgtttgacttttgacaataacaaaaatggttttggattttgttttatttccaaaaaatgtatacaatatcagaacttcacattttatatactagtatctggctattagtattttacaggaaccatagttcttggtgactacatatatatatatatttttgtgaccttttttgtaaactaagtgccgtttcaacgttacaatcatttttagggttattgtaatcaatgtgaatatcatgttttttcaaatctgttctgagcctatagtgtttgctttgtgaacatgtgtattgtatatattctgtatagttatattgtactgaaattagcttgtttgatataaggaaaatatgtattgagtacctttttgctagcctgattgtttaatctttttaaaaaaggtttaaactttttttaaaaaaaaaatctttaaactggcctttattacatggtcacacataaagttgcagttaggaaagggatgggcagggaaaaactagttttgagtgtctttagatagaaacatgagactaaggtttgattttgttttcgttttctcattaaaatatcttatgctttatggaataaaaaaaaaacaaaggg

SEQ ID NO: 1645 - protein, 25 aa, Homo sapien
MRLRFDFVFVFSLKYLMLYGIKKKQ

SEQ ID NO: 1646 - DNA, 1393 bp, Homo sapien
aaaaaagataagcagtggaggccgaatcatggagggtcttgaatacctggctaaggagtttaaagtgtatccaagaggacgtgggagccactgatggttcatgaggaagagaagggcaggaccagcactgattgaaaaggagggcttgttcagtgtggaggaagaatcagaagggggaataagttaccttctccgagcctgcaagaacaaaaaacaaaaagcagaaattaaaatcaggtttcactgctatttatatatttctcctttcccaaatgatttttctaaagctgggagtggaggtaggagggagaaacagaaggtgagcagggaggctatttagatgtgtcaaacccgggtgatcattaataatttgggcatatatatgctcccaaacttactctgcccccttccttcccttttttttttttttttggtatgggccttttaggcttgggccagccagctttcttgagatgagtgaataaaagcgtattgtaatttcatgtctgcttcagatcatggggacagtgccacccaggaactgctgctgaggcctgggaagctcccttgccttcgggtttggagcagtggcatcatcccaccaacctgagccatgaaagggctgagcagaaagttaaatggtagtttcctgactggaagccacacgtaggtcacttgagtagtcaggaagcacagtgggtgtggagccatcatctgtcttgggctggttcctcccaatctttgtccagtggtataaatggactgtctgctgatggccatacgcagcactggctgttaagatggggaaggggtacatcaggattccactcatagccctggttcgttattgttactcatggctctgacgtccccaagccctcttgaatgttgcaagcaatgttaaatatcacacctcggtctccttttgagcagcccaggtacctaaagcaaggtcaccaaacttgggtttaaacttcagttgccatcacagcagggttcaggttatgcagtttttgcagtgtggagttgaacgctgggtaaagaagggagagctgactctccattgcttttctagtggaaaccagccagtttgacggcacggtgcggatacaggactccatcaggctagtgttggggaaccagcccggcagccttccatgtgaattccaaagctgtttcaacactggctgataggcagacaaaaggttacttgtgtgtttctctgagaagcggtgtaaatgaagtcaccttagaatatattctgtgcggatgcttatattttgttaacttcacgacttatggcatgtcttatttaaaaaaaaaaaagtactaggtgcaaataacattatgaagtggtatttaattaaaaatccatgcagtgacagctgaaaaa

SEQ ID NO: 1647 - protein, 79 aa, Homo sapien [sequence omitted]

SEQ ID NO: 1648 - DNA, 579 bp, Homo sapien
  Unsure 3, 5, 7, 12, 19, 22, 51, 56, 59, 62, 77, 124, 142, 197, 216, 228,477, 495, 531, 549: Unknown base
ctncngnatcancggaaanganaaggaaaatgtcactactcacctatgttntgcanaanagntaggtgtgctggggntggatactgctcttttacttgagcattggttgattaaagtttatgtnccatccaggctggtctanagaagtctttggagttaaccatgctctttttgttaaagaagagagtaatgtgttnatcctggctcatagtccgncaccgaaaatanaaaatgccatccataggtaaaatgctgacctatagaaaaaaatgaactctacttttatagcctagtaaaaatgctctacctgagtagttaaaagcaattcatgaagcctgaagctaaagagcactctgatggttttggcataatagctgcatttccagacctgacctttggccccaaccacaagtgctccaagccccaccagctgaccaaagaaagcccaagttctccttctgtccttcccacaacctncctgctcccaaaactatnaaattaatttgaccatattaacacagctgactcctncagtttacttaaggttanaaagaatgagtttacaacagatgaaaataa

SEQ ID NO: 1649 - DNA, 4277 bp, Homo sapien
gtttctcatagttggcgtcttctaaaggaaaaacactaaaatgaggaactcagcggaccgggagcgacgcagcttgagggaagcatccctagctgttggcgcagaggggcgaggctgaagccgagtggcccgaggtgtctgaggggctggggcaaaggtgaaagagtttcagaacaagcttcctggaacccatgacccatgaagtcttgtcgacatttataccgtctgagggtagcagctcgaaactagaagaagtggagtgttgccagggacggcagtatctctttgtgtgaccctggcggcctatgggacgttggcttcagacctttgtgatacaccatgctgcgtgggacgatgacggcgtggagaggaatgaggcctgaggtcacactggcttgcctcctcctagccacagcaggctgctttgctgacttgaacgaggtccctcaggtcaccgtccagcctgcgtccaccgtccagaagcccggaggcactgtgatcttgggctgcgtggtggaacctccaaggatgaatgtaacctggcgcctgaatggaaaggagctgaatggctcggatgatgctctgggtgtcctcatcacccacgggaccctcgtcatcactgcccttaacaaccacactgtgggacggtaccagtgtgtggcccggatgcctgcgggggctgtggccagcgtgccagccactgtgacactagccaatctccaggacttcaagttagatgtgcagcacgtgattgaagtggatgagggaaacacagcagtcattgcctgccacctgcctgagagccaccccaaagcccaggtccggtacagcgtcaaacaagagtggctggaggcctccagaggtaactacctgatcatgccctcagggaacctccagattgtgaatgccagccaggaggacgagggcatgtacaagtgtgcagcctacaacccagtgacccaggaagtgaaaacctccggctccagcgacaggctacgtgtgcgccgctccaccgctgaggctgcccgcatcatctaccccccagaggcccaaaccatcatcgtcaccaaaggccagagtctcattctggagtgtgtggccagtggaatcccacccccacgggtcacctgggccaaggatgggtccagtgtcaccggctacaacaagacgcgcttcctgctgagcaacctcctcatcgacaccaccagcgaggaggactcaggcacctaccgctgcatggccgacaatggggttgggcagcccggggcagcggtcatcctctacaatgtccaggtgtttgaaccccctgaggtcaccatggagctatcccagctggtcatcccctggggccagagtgccaagcttacctgtgaggtgcgtgggaaccccccgccctccgtgctgtggctgaggaatgctgtgcccctcatctccagccagcgcctccggctctcccgcagggccctgcgcgtgctcagcatggggcctgaggacgaaggcgtctaccagtgcatggccgagaacgaggttgggagcgcccatgccgtagtccagctgcggacctccaggccaagcataaccccaaggctatggcaggatgctgagctggctactggcacacctcctgtatcaccctccaaactcggcaaccctgagcagatgctgagggggcaaccggcgctccccagacccccaacgtcagtggggcctgcttccccgaagtgtccaggagagaaggggcagggggctcccgccgaggctcccatcatcctcagctcgccccgcacctccaagacagactcatatgaactggtgtggcggcctcggcatgagggcagtggccgggcgccaatcctctactatgtggtgaaacaccgcaagcaggtcacaaattcctctgacgattggaccatctctggcattccagccaaccagcaccgcctgaccctcaccagacttgaccccgggagcttgtatgaagtggagatggcagcttacaactgtgcgggagagggccagacagccatggtcaccttccgaactggacggcggcccaaacccgagatcatggccagcaaagagcagcagatccagagagacgaccctggagccagtccccagagcagcagccagccagaccacggccgcctctcccccccagaagctcccgacaggcccaccatctccacggcctccgagacctcagtgtacgtgacctggattccccgtgggaatggtgggttcccaatccagtccttccgtgtggagtacaagaagctaaagaaagtgggagactggattctggccaccagcgccatccccccatcgcggctgtccgtggagatcacgggcctagagaaaggcacctcctacaagtttcgagtccgggctctgaacatgctgggggagagcgagcccagcgccccctctcggccctacgtggtgtcgggctacagcggtcgcgtgtacgagaggcccgtggcaggtccttatatcaccttcacggatgcggtcaatgagaccaccatcatgctcaagtggatgtacatcccagcaagtaacaacaacaccccaatccatggcttttatatctattatcgacccacagacagtgacaatgatagtgactacaagaaggatatggtggaaggggacaagtactggcactccatcagccacctgcagccagagacctcctacgacattaagatgcagtgcttcaatgaaggaggggagagcgagttcagcaacgtgatgatctgtgagaccaaagctcggaagtcttctggccagcctggtcgactgccacccccaactctggccccaccacagccgccccttcctgaaaccatagagcggccggtgggcactggggccatggtggctcgctccagcgacctgccctatctgattgtcggggtcgtcctgggctccatcgttctcatcatcgtcaccttcatccccttctgcttgtggagggcctggtctaagcaaaaacatacaacagacctgggttttcctcgaagtgcccttccaccctcctgcccgtatactatggtgccattgggaggactcccaggccaccaggccagtggacagccctacctcagtggcatcagtggacgggcctgtgctaatgggatccacatgaataggggctgcccctcggctgcagtgggctacccgggcatgaagccccagcagcactgcccaggcgagcttcagcagcagagtgacaccagcagcctgctgaggcagacccatcttggcaatggatatgacccccaaagtcaccagatcacgaggggtcccaagtctagcccggacgagggctctttcttatacacactgcccgacgactccactcaccagctgctgcagccccatcacgactgctgccaacgccaggagcagcctgctgctgtgggccagtcaggggtgaggagagcccccgacagtcctgtcctggaagcagtgtgggaccctccatttcactcagggcccccatgctgcttgggccttgtgccagttgaagaggtggacagtcctgactcctgccaagtgagtggaggagactggtgtccccagcaccccgtaggggcctacgtaggacaggaacctggaatgcagctctccccggggccactggtgcgtgtgtcttttgaaacaccacctctcacaatttaggcagaagctgatatcccagaaagactatatattgttttttttttaaaaaaaaaagaagaaaaaagagacagagaaaattggtatttatttttctattatagccatatttatatatttatgcacttgtaaataaatgtatatgttttataattctggagagacataaggagtcctacccgttgaggttggagagggaaaataaagaagctgccacctaacaggagtcacccaggaaagcaccgcacaggctggcgcgggacagactcctaacctggggcctctgcagtggcaggcgaggctgcaggaggcccacagataagctggcaagaggaaggatcccaggcacatggttcatcacgagcatgagggaacagcaaggggcacggtatcacagcctggagacacccacacagatggctggatccggtgctacgggaaacattttcctaagatgcccatgagaacagaccaagatgtgtacagcactatgagcattaaaaaaccttccagaatcaataatccgtggcaacatatctctgtaaaaacaaacactgtaacttctaaataaatgtttagtcttccctgtaaaa

SEQ ID NO: 1650 - protein, 1115 aa, Homo sapien [sequence omitted]

SEQ ID NO: 1651 - DNA, 1734 bp, Homo sapien
ggcacgaggctggaaccaaacagtttggcatgtgtgtcagtgatacacaaaatagttttgcagattatggttgtatgttacaaattagaaacgtgcatttcttaccggacggaaggtctgtggttgatacagttggaggaaagcggtttagggttttaaaaagaggaatgaaagatggatattgcactgccgacattgaatatctggaagatgttaaggttgagaatgaagatgagattaagaatctcagagagcttcatgatttggtttactctcaagcctgcagctggtttcagaatttaagagacagatttcgaagccaaattcttcagcatttcggatcaatgcccgagagggaggaaaaccttcaggcagcccctaatggacctgcatggtgttggtggcttcttgcagttctccctgtagacccacgataccagctgtcggttttgtcaatgaagtctttgaaagaacggttgaccaagatacagcatatactgacctatttttctagagaccaatctaagtaactaactctttggatctccctttaaagtgaccctaatctggctgcattgatggccagattgtctgctgcctttgcacatctagtgctggtttcagaaatttaatgaaacttttctttttccttcgacctcctgaatcatgtggttctgcaaatgaataccttcaactaggatttagaccactaagaacttgcacagaaaaacacgcattgaatgtgtgtcgaacctctacattgtgaagttgcactatgtaccatactctaaaatgaaataagaactctttatgtctgtgagagagtgtgtgtgtgtgtgtgcgtgcgtgtgtgcttgtgggggttgggtagtgtgtgtgtattttctctggctttaaaatcttaaaacaaacaaacaaaaaagccatagagagcagaacttgccgagggtcatttattgcccaagtttacaagagtagcgatacaagtttttgcaaattgaatttgcctcagatatatctgtcctaatgcttatatttgcacaagtatgtaaaatatcgtgttgaggatcattctttgttggaaatactgctcttgctgaactgtcttgaccattgactatgacacagtttcttatttatgtaaatacttgcatcacagtggccgacaggcattggatgcagaacctagagccagttttcaggaacaattgtaaacctgacatggtactgtgcatctattcataaaacactcaaaactgtgaaaatatggtttacatttaattgtacataaaggtaaagggagaactcaattcagtaccagttagtttgtacattttagggggcttttcacattaactgcccatttgtgtaatttatagtttgacatgatgtgtttgttttaaaaaaaaatgcatagtataaacccattaaggatctgggaaaagagaagaagtttaatatagaactaagcttttaaagtttgtttttgtttttaattctggtctcggtgcaaatgttagttatgccttattcatatcacagttagatcaccatgctgcaacatggtttatattcatgctgccctagaaacttttgtaattatttgttgcaaatttgtgactgtccttattaactttcttttatgtaagtaatttgtaaaagtttcttaaaatttttgcttttgcttatttaattttgaataaaagctaaattcctaaaaaaaaaaaaaaaaaa

SEQ ID NO: 1652 - DNA, 5222 bp, Homo sapien
cttttccaagacttttctgggttagtttgctttccagcccactgatttccttcttattggacaggtcactcttttgcatcccaagcctggcttaggcaagtccctgaggttagtaaacaccttcagtgcccctcagccgagtcccttttgaccatggaataccatcagcctgaggatccagcccctggtaaggccgggactgcagaagcagtcatccctgaaaaccatgaggttctggcaggcccagatgagcaccctcaggacacagatgcaagagatgctgatggggaggctagagaacgggagccagcagaccaagctttgctgcctagccagtgtggggacaaccttgagtcccctctgcctgaagctagctcagctccaccggggccaacccttgggacactgcctgaagtagagacaataagggcatgctccatgccccaggagcttcctcagtcccccaggacccgacagcctgagccagatttctactgtgtcaagtggatcccttggaaaggagaacagacacccatcatcacccagagcactaacggcccttgccctctccttgccatcatgaacatcctctttcttcagtggaaggtgaagctccccccgcagaaggaagtgatcacatcggatgagctcatggcccatcttggaaactgcctcctgtccatcaagccccaggagaagtcagagggacttcagcttaattttcagcagaatgtggatgatgcaatgacagtgctgcctaaactggccacaggtctggatgtcaatgtgcgattcacaggcgtctctgattttgagtatacacccgagtgcagtgtctttgacctgctaggcatacctctgtaccatggctggcttgttgatccacagagtcctgaggctgtgcgtgcagttgggaaactgagttacaaccagctggtggagaggatcatcacctgcaaacactccagtgacaccaacctcgtgacagaaggcctgattgcagagcagttcctggagaccaccgcggcccagctgacctaccacggactgtgtgagctgacagcagctgctaaggagggtgaacttagcgtctttttccgaaacaaccactttagcaccatgactaagcataagagtcacttatacctactggtcactgaccagggctttctacaggaggagcaagtcgtatgggagagcctgcacaatgtggatggagacagctgcttttgtgactctgactttcacctgagtcattccctgggcaaggggcctggagcagaaggtgggagtggctccccagaaaagcagctgcaggtagaccaggactacctgattgctctgtccctgcagcagcaacagccacgaggcccgctggggcttaccgacttggagctggcccagcagcttcagcaagaggagtatcaacagcagcaggcagcgcagccagtgcggatgcggacgcgggtcctgtcactgcaggggagaggagccacatctggacgcccagccggggagcgtcggcagaggccgaagcacgagtcagactgcattctgctgtagctctgccccagtgccaggctggcctgccccttcttccagaggctatggctagttggcttgctcccccgcctccacccctgagatgtgctggataacttatttatggactgttggggatgagagcaggcaacaaatgccaaggtcagacttggtaatgtccttgacctcacgtgctgctgccttctctgcctcccacccagggcaacactaggattggtgggtttctggttctcaactcccggtccctgaatagtcacacgtatgtacagactgaggctctggggtgaggtccctatccagaatgcatctcttctgcttcccatccctgctgcctggatgctcctgatcacctaggcaggcctgtctccagttgtttcagagcttaatttgggtttctatctcttatttgtaatgccttcctggggtttggaaataaaacttctggccgggcacggtggctcactcctgtaatctcagcaatttgagaggccaaggtgggcggatcacctgaggttaggagttcgagaccagcctgcccaaaaaggtgaaaccccgtctctactaaaaatacaagaaattagctgggactacaggcatgcgccactgcgcccagctagtttttgtatttttagtagagacggtttcgccactttggtcaggctagtcttgaattcctgacctcaagtaatccgcctgccttggcctcccgaagtgctggaattacaggcgtgagccactgcgcccagctacctgtcatttctaatatagcctgcagggggaaccaaagcctgactttttgtttttgtttctgtttttgtttttgttttctatgggaaatagtgctctcctgggaggtgggtttccaaatctctgcttggacacatgaatttgagggttgtgctctccactaacccaagaattcccatgctggggagggtagcttggccctccgcttgcttcccagttcatacagatggtcctttgctccctctatttctcaccttgttctaatgcctgtttctcaattattttgcctgaagtttcctggagaatgagggtgaggggagacctggagtgggagacctgggtgtggattactgtagcactaaggcaaaacaggattcctgcggaatagccaagtgcacatcaaaggcacctccaactccagtgcctcttcccggtccatgtcctgctccacccaaccttcaatcagggaacacaaacaacagcgaagtttgccaaaagaattcgagtatcagtgagatgttctggccagggtacaggagggatgagtgaggcagaaactatcaaagaaaactcatttccccacacccaagaaggagctggatgacccaggtacagatataattttgagatgggaaaattaagggattttaaagaaacagttccagcctcaacaagaagctagagaatgtggtgctcagtgaggggttatcctacttggaggcccagctggtctcccaggttcagccaaacacggaaatctcagatcctcggatgtcatgtggggtggggcagggaagtctcacatgtcttcagccctgcacaaggccaggagggctgactggcaatcccctttcactgcatcctgcagacaagggaattcagtgttagaaagatccaccaccactatggcccaagtgctctctcccctcctttgggctggtccatcacagttcatctgggagggaagggtcctcccgggagctcagagtcctgcactacattaaccaaagactcctgggttttcttttttgggatggagtcttgccctgtcacccaggtgggagtgcagtggcgcgatcttggctcactgcaacctctgccttctgggttcaagcgactctcctgcctcagcctcctgagtagctgggattgcaggtgcacgccaccatgcctggctaatttttgtatttttagtagagacggggtttcaccatgttggtcagggtggtcttgaactcctgacctcgtgatccgcccacctcagcctctcaaagtgctgggattgcaggcgtgagccactgtgcctggctaactactgggttttctatggggcaagaatatgctcagctgtgtgcagggagtgagggtggaggtgaggagtgaaggcctgaggctccaggctaagaagtagccaagtttcacctggagagaagagtagagggacttcccaaatttcttcctgaactcagctctgatactcagaaggtcagtctcacatcgagagataaggatgcgaatcaggacttggtaattgggctcagtttcctagtaggggaagaaagagatggggggtagttagtgagagtctcactgagagtaggggttgaatggcttggagggttattgtaggaaggggaggcaaggtgggagtcaagggataagagtgtacattatacattatctcgggacaaaagttatgtttgtccatcctcaaggaagatgacacagcaggaaagatcagtctctgtgggggcagcttgagtatttatttctttccacatgtctttcctgcccctaccattagcttagagctgtgtacctccagaatttggtggtgagcagctccaaagataggtacaccaggaaggctagaaaagatttggtgcatataaagactgccagcatgaaaaccaggaaaactgcttttaactttcaagttagtgaatatccaaggaggatatacctgccctatccctaaactgagctgatgaggctctgatagggttcaaggttgtgtgacttctagttctgattccaacccaatagggccatctcacagccccatctctgcatattagtttctccggttggacccttaggctgaaacattgctatcttcctcctgtacatgcagcaggcctgttttttggctaaagaaagtaatgaaaggttcagtttagaaataacaggccaggcacagtggctcatgcctgtaatcccagcgctttgggaggatgaggcgcgtggatcatctgaggtaggagtttgagaccagcctgaccaaaatggtgaaaccccgtctctactaaaaatacaaaaataagccaggcatggtggtgggtgcctgcagtcccagctacttggaaggctgaggcaggagaattgcttgagcccaggaggcggaggttgcagtgagctgagatcgcgccactgcactccaacctgggcaagaagagcaaaactccgtctcaaaaaaaaaaaaaaaaaagaaagaaagaaaaaagaaataacaggccaggtgtggtggctcatgcctgtaatcccagaattttgggaggccaaggcaagcagatcatttatggtcaggagttcgagaccagcctggccaacatggtgaaacccccgtctctattaaaactacaaaaattagccaggtgtggtggtaggcgcctataatcccagctactgaggagggtgaggtaggagaattgcttgaacctgggaggcggacgttgcagtaagctgagatcacaccactgcactccagcctgggacagaccaagactccgtctcaaaaaaaaagaaaagaaaagaaataacacaggtacaagtcatcaaaatcctgaattataattgattatactaagtaatgtgttgttatgagagatttttaaataaaaacttttaattgt

SEQ ID NO: 1653 - DNA, 9416 bp, Homo sapien
aagcgcgccgcctccccgccctctctcactccccgctcctctccgccgcgcactctcgcggcgctgggagagggcggagggggaggcggcgcgcggcgccagaggaggggggacgcagggggcggagcggagacagtaccttcggagataatcctttctcctgccgcagtggagaggagcggccggagcgagacacttcgccgaggcacagcagccggcaggatggcgaccgtggtggtggaagccaccgagccggagccgtccggcagcatcgccaacccggcggcgtccacctcgcctagcctgtcgcaccgcttccttgacagcaagttctacttgctggtggtcgtcggcgagatcgtgaccgaggagcacctgcggcgtgccatcggcaacatcgagctcggaatccgatcatgggacacaaacctgattgaatgcaacttggaccaagaactcaaactttttgtatctcgacactctgcaagattctctcctgaagtcccaggacaaaagatccttcatcaccgaagtgacgttttagaaacagtggtcctgatcaacccttctgatgaagcagtcagcaccgaggtgcgcttaatgatcactgatgctgcccgacacaagctgctcgtgctgaccgggcagtgctttgaaaataccggagagctcattctccagtccggctctttctccttccagaacttcatagagattttcaccgatcaagagatcggggagttactaagcaccacccatcctgccaacaaagccagcttaaccctgttctgtcctgaagaaggggactggaagaactccaatcttgacagacacaatctccaagacttcatcaatattaaactcaattcagcttctatcttgccagaaatggaaggactttctgagtttaccgagtatctctcagaatcagtggaagtcccatctccctttgacatcttggaacctcccacatcgggtggatttctgaagctctccaagccctgctgttatatttttccaggagggaggggcgattctgccttgtttgcagtgaatggtttcaatatgctcatcaatggcggatcagagagaaaatcctgcttctggaagctcatccgacacttagaccgagtggactccatcctgctcacccacattggggatgacaatttgcctggaataaacagcatgttacagcggaaaattgcagagctcgaggaagaacagtcccagggctccaccacaaatagtgactggatgaaaaacctcatctcccctgacttaggagttgtatttctcaatgtacctgaaaatctcaaaaatccagagccaaacatcaagatgaagagaagcatagaagaagcctgcttcactctccagtacctaaacaaattgtccatgaaaccagaacctctgtttagaagtgtaggcaatactattgatcctgtcattcttttccaaaaaatgggagtaggtaaacttgagatgtatgtgcttaatccagtcaagagcagcaaggaaatgcagtattttatgcagcagtggactggtaccaacaaagacaaggctgaattcattctgcctaatggtcaagaagtagatctcccgatttcctacttaacttcagtctcatctttgattgtgtggcatccagcaaaccctgcggagaaaatcatccgagtcctgtttcctgggaacagcacccagtacaacatcctggaagggttggaaaagctcaaacatctagactttctgaagcagccactggccacccaaaaggatctcactggccaggtgcccactcctgtggtgaaacaaacaaaactgaaacagagggctgatagccgagaaagtctgaagccagccgcaaaaccacttcctagcaaatccgtgcgcaaggagtcaaaagaagaaacccctgaggtcacaaaagtgaatcacgtggaaaagccacccaaagttgaaagcaaagaaaaggtaatggtgaaaaaagacaagccagtaaaaacagagaccaaaccttcagtgactgaaaaggaggttcccagcaaagaagagccatctccagtgaaagccgaggtggctgagaagcaagccacagatgtcaaacccaaagctgccaaggagaagacggtgaaaaaggaaacaaaggtaaagcctgaagacaagaaagaggagaaagaaaagccaaagaaagaagtggctaaaaaggaggacaaaacacctatcaagaaggaggaaaaaccaaaaaaggaagaggtgaaaaaagaagtcaaaaaagagatcaagaaagaagagaaaaaagaacccaagaaagaggttaagaaagaaacaccgccaaaggaagtcaagaaggaagttaagaaggaagagaagaaggaagtgaaaaaggaagaaaaggaacccaaaaaagaaattaagaagctccctaaagacgcaaagaaatcatctactcctctgtctgaagcaaaaaaaccagctgctttaaaaccaaaagtacccaagaaggaagagtctgtcaagaaagattctgttgctgccggaaagccaaaggagaaggggaaaataaaagtcattaagaaggaaggcaaggccgcagaggctgtcgctgcagctgtcggcactggagccaccacagcagctgtcatggcggcagctggaatagcagccattggccctgccaaagaactcgaagctgagaggtcccttatgtcatctcctgaggatctaaccaaggactttgaagagttaaaggctgaagaggtcgatgtaacaaaggacatcaagcctcagctggagctaatcgaagacgaagagaaactgaaggaaactgagccagtcgaagcctacgtcatccagaaggagagagaagtcaccaaaggtcctgccgagtcccctgatgagggaatcactaccactgaaggggagggcgaatgtgaacagacacctgaggagctggagcccgtcgagaagcagggagtagacgacattgaaaaatttgaagatgaaggagccggttttgaagaatcttcagagactggagactatgaagagaaggcagaaactgaggaggctgaggagccagaagaggatggggaggaacacgtatgtgtgagcgcctccaagcacagccccactgaggatgaggaaagtgccaaggcggaggctgatgcatacatcagggagaagagggagtctgtggccagtggggatgaccgagccgaagaagacatggatgaggccattgagaaaggagaggctgaacaatctgaagaggaggctgatgaggaggacaaagctgaagatgccagagaggaggaatatgagccggaaaaaatggaagctgaagactatgtgatggctgtggtcgacaaggctgcagaggctggtggtgccgaggagcagtatggattcctcaccacaccaaccaagcaactaggagcccagtctcctggccgagaacctgcatcttcaattcatgatgagactttacctggaggctcagagagcgaggccaccgcttctgatgaggagaatcgagaagaccagcctgaggaattcactgccacctctggctacactcagtctactattgagatatccagtgagcccacccccatggatgagatgtctacccctcgagacgtgatgagtgatgagaccaacaatgaagagacggagtccccttctcaggaattcgtaaatatcaccaaatatgaatcttcattgtattctcaggaatactctaaacctgctgatgttacaccgctcaacggattttctgaaggatcaaaaacagatgccactgatggcaaggattacaatgcttcagcctctaccatatcaccaccctcttccatggaggaagacaaattcagcagatctgctttacgtgatgcttactgctctgaagtgaaagccagcaccactttggacatcaaagatagcatctcagctgtttcaagtgaaaaggtcagcccatcgaagagcccgtccctgagtccatctccaccatcacccttagaaaagacccccctgggtgaacgtagtgtgaacttctctctgacgcccaatgagattaaagtctctgcagaggcagaagtagccccggtgtctcctgaggtgacccaagaagtagttgaagaacattgtgctagtcctgaggacaagactctggaagtggtgtcaccatctcagtccgtgactggcagtgctggtcacacaccttactatcaatctcctactgacgagaaatccagtcatctccctacagaagtcattgaaaaaccaccagcagttccagtgagttttgaattcagtgatgccaaagatgagaatgaaagggcttcagtaagccccatggatgagcccgtgcctgactcagagtctcctattgaaaaagttttgtctcctttacgcagcccgcccctcattggatccgagtctgcttatgaaagttttctaagtgctgatgacaaggcttctggcagaggtgccgaaagtccttttgaagaaaagagtggaaaacaaggctctccagaccaagtaagtccagtttctgaaatgacttctactagtctttaccaagacaaacaggaagggaaaagcacagactttgcaccaataaaagaagactttggccaagaaaagaaaactgatgatgttgaagccatgagttctcaaccagcactggctctggatgaaaggaaattaggagatgtttctcccacacaaatagatgtcagtcagtttggatcttttaaagaagacactaagatgtccatttctgaaggtactgtctcagacaagtcagctactcctgttgatgagggcgtagcagaagacacgtactctcatatggagggtgtggcctcagtgtccacagcctcagtggctacgagctcatttccagagccaacaacagatgatgtgtctccatctctgcatgctgaggttggctccccacattccacagaagtagatgactccctttcagtgtctgttgtgcaaacacctaccacattccaggaaacagaaatgtctccatctaaagaagaatgcccaagaccgatgtcaatttctccaccagatttctcccctaaaactgcaaagtccaggacacccgttcaagatcacagatctgaacagtcctcaatgtctattgaatttggccaagaatctcctgagcaatcccttgctatggacttcagtcgacagtctccagatcaccctacagtgggtgcaggcgtgcttcacatcactgaaaatgggccaactgaagtggactacagtccttctgacatgcaggactccagtttatcacataagataccacctatggaggagccgtcctacacccaagataatgatctttctgagctcatctcagtatctcaggtagaggcctccccgtccacctcttctgctcataccccttctcagatcgcttctcctctccaagaagatactctatccgatgttgctcctcccagagatatgtccttatatgcctcactcacctctgaaaaagtgcaaagtctggaaggagagaagctctctccaaaatctgatatctctccactcaccccacgagagtcctctcctttatattcacctactttttcagattctacctctgcagtcaaagagaaaacagcaacttgccacagttcctcttctccaccaatagatgcagcatccgcagagccctatggcttccgtgcctcagtgttattcgatacaatgcaacaccatctagccttgaatagagatttgtccacacctggcctggagaaggacagtggagggaagacacctggtgactttagctatgcctatcaaaagcctgaggaaacaaccaggtccccagatgaagaagattatgactatgagtcttatgagaagaccacccggacctcagatgtgggtggctattactatgagaagatagagagaaccacaaaatctccaagtgacagtggctactcctatgagaccattgggaaaactaccaagacccctgaagatggtgactattcctatgaaattattgagaagaccacacggacccctgaagagggtgggtactcatatgacataagtgaaaagaccaccagcccccccgaagtgagtggttacagctatgaaaagactgagaggtctagaaggcttctggatgacatcagcaatggctatgatgactctgaggatggtggccacacacttggggaccccagctactcttatgaaaccactgagaaaattaccagtttccctgagtctgaaggttattcctatgagacatctacaaagacaacacgaacccctgatacttccacatactgttacgagactgcagagaaaatcactagaacccctcaggcatccacatattcctacgagacttcagacctatgctacactgcagaaaagaagtccccctcagaagcccgtcaggatgtcgatttatgcctcgtgtcctcttgtgaatacaagcaccccaagacagagctttcaccctctttcattaatcccaatcctcttgagtggtttgccagtgaagaacccactgaagaatctgaaaagcccctcactcaatcagggggagccccaccgcctccaggaggaaagcaacagggccgacagtgtgatgaaacccctcccacctcagtcagcgagtcagccccatcccagaccgactctgatgttcccccggagactgaagagtgcccctccatcacggccgatgccaatatcgactctgaagacgagtcggaaaccatccccacagacaaaactgtcacgtacaaacacatggacccacctccagctcccgtgcaagaccgcagcccttcgccacgccaccctgatgtgtccatggtggacccagaggccttggccattgagcagaacctgggcaaagctctaaagaaagatctgaaagagaagaccaaaaccaaaaagccaggtacaaagaccaagtcatcttcacctgtcaaaaagagtgatgggaagtctaagcccttggcagcttcaccaaaaccagcgggcttgaaagaatcctcggataaagtgtccagggtggcttctcctaagaagaaagaatctgtggaaaaggcagcaaaacccaccaccactcctgaggtcaaagctgcacgtggggaagagaaagacaaggagaccaagaatgctgccaatgcctctgcatccaagtcggccaagaccgccactgcaggaccaggaactaccaagacgaccaagtcatctgctgtgcccccaggcctccctgtgtatttggacctgtgctacattcctaaccacagcaatagtaagaatgttgatgtggaatttttcaagagagtgcggtcttcctactacgtggtgagtgggaatgaccctgctgctgaggagcccagccgggctgtcctggacgctttgttggaaggaaaggctcagtggggcagcaacatgcaggtgacactgatcccaactcatgactcagaagtgatgagggaatggtaccaggagacccatgagaaacagcaagatctcaacatcatggttttagcaagcagcagcacagtggttatgcaagatgaatccttccctgcatgcaagattgaactgtaaaaaccaaggccagccacaccacaggatctgaactttgtttccagaaattcttcaatttgaaatcaccttttctaaaaagtcaattcatctagttaagtcgctgaacaattacctgccaaatgctatactgtgtcatggtgatgcaagtcactaaatttctcagtttttgctgattgctaagggaaataacagtatttccacaatagggttcaaattcctgcaaaattacctaccccagttcatctctgctgaacatttggaaaccatgcactagccaacccaactgacttctgctaggtagaggcatttgtcttagagagagagagagcgcgggagagagtgagagagagtgagagcacaaagataacgcaggagagagagagagaaagaatgagaaagaaaaggaatgcaagagaaggagatgtaatgacagagagttctggtgagatacccagagagaaaaagagagagcagggtggggtaaggaggagaaaataaaccaacaattaggtctgcattttctcaggcagtaggcattctttagtctacataggcaaagttttccatttttgtcagtctgagtcatcaaaaagagtcttaattttctaaaacaagttggctagaagaaagtaaaaagaacaacacttgttatgagggcatgtgatattttcacatcttaattaagctccttcagtttgaaggctgcacactgacataatgtagtgagtgtagactggccatgcaagtggtttgggccccattcagaactctcagactctaaacacacaagtagattgatctaaggcatgctcccagcatttgtccacccacttagtccactctgagtcgattaacctgcatgcagcaacacccaagtccaccccaattaactgaagcaaataccaaagcagttgggagtacatatggtagacaatttgccttaggaagtgacttgaatgtacaaagatacttgatgcacttattttttaatgtgagacagcaagtttataaaacatccatataggattatagatacttaaaggaacacgtgggtgagcgtgtgtgggggtactagaagctgatctgattggtccaacagtttgatgctgagtcatgcgtgttgaatcccacttcagtgcacctgtggcctctcagtcaaacaagttgtgcctttcacagcttctttactactgcaagttcaagactgaaatggcttctatgatcagaactgggaaaacagtgaatcttatggtggaagaggttctcagcaagtgtacagtatttaccttcctttgtcttacattggctttttaaattttccattaatttcaacataattatgggaacaagtgtacagaagaattttttttttaagatatgtgagaacttttcatagatgaactttttaacaaatgttttcatttacaggaaattgcaaagaaaattctcaagtgatagtctttttttttaagtgtttcgtaagacaaaaattgaataatgttttttgaagttctggcaagattgaagtctgatattgcagtaatgatatttattaaaaacccataactaccaggaataatgatacctcccaccccttgattcccataacataaaagtgctacttgagagtgggggagaatggcatggtaggctacttttcagggccttgacaagtacatcacccagtggtatcctacatacttctttcaagatcttcaaccatgaggtaaaagagccaagttcaaagaaccctagcacaaatttgctttgggattttcttttctgga

SEQ ID NO: 1654 - protein, 2468 aa, Homo sapien
MATVVVEATEPEPSGSIANPAASTSPSLSHRFLDSKFYLLVVVGEIVTEEHLRRAIGNIELGIRSWDTNLIECNLDQELKLFVSRHSARFSPEVPGQKILHHRSDVLETVVLINPSDEAVSTEVRLMITDAARHKLLVLTGQCFENTGELILQSGSFSFQNFIEIFTDQEIGELLSTTHPANKASLTLFCPEEGDWKNSNLDRHNLQDFINIKLNSASILPEMEGLSEFTEYLSESVEVPSPFDILEPPTSGGFLKLSKPCCYIFPGGRGDSALFAVNGFNMLINGGSERKSCFWKLIRHLDRVDSILLTHIGDDNLPGINSMLQRKIAELEEEQSQGSTTNSDWMKNLISPDLGVVFLNVPENLKNPEPNIKMKRSIEEACFTLQYLNKLSMKPEPLFRSVGNTIDPVILFQKMGVGKLEMYVLNPVKSSKEMQYFMQQWTGTNKDKAEFILPNGQEVDLPISYLTSVSSLIVWHPANPAEKIIRVLFPGNSTQYNILEGLEKLKHLDFLKQPLATQKDLTGQVPTPVVKQTKLKQRADSRESLKPAAKPLPSKSVRKESKEETPEVTKVNHVEKPPKVESKEKVMVKKDKPVKTETKPSVTEKEVPSKEEPSPVKAEVAEKQATDVKPKAAKEKTVKKETKVKPEDKKEEKEKPKKEVAKKEDKTPIKKEEKPKKEEVKKEVKKEIKKEEKKEPKKEVKKETPPKEVKKEVKKEEKKEVKKEEKEPKKEIKKLPKDAKKSSTPLSEAKKPAALKPKVPKKEESVKKDSVAAGKPKEKGKIKVIKKEGKAAEAVAAAVGTGATTAAVMAAAGIAAIGPAKELEAERSLMSSPEDLTKDFEELKAEEVDVTKDIKPQLELIEDEEKLKETEPVEAYVIQKEREVTKGPAESPDEGITTTEGEGECEQTPEELEPVEKQGVDDIEKFEDEGAGFEESSETGDYEEKAETEEAEEPEEDGEEHVCVSASKHSPTEDEESAKAEADAYIREKRESVASGDDRAEEDMDEAIEKGEAEQSEEEADEEDKAEDAREEEYEPEKMEAEDYVMAVVDKAAEAGGAEEQYGFLTTPTKQLGAQSPGREPASSIHDETLPGGSESEATASDEENREDQPEEFTATSGYTQSTIEISSEPTPMDEMSTPRDVMSDETNNEETESPSQEFVNITKYESSLYSQEYSKPADVTPLNGFSEGSKTDATDGKDYNASASTISPPSSMEEDKFSRSALRDAYCSEVKASTTLDIKDSISAVSSEKVSPSKSPSLSPSPPSPLEKTPLGERSVNFSLTPNEIKVSAEAEVAPVSPEVTQEVVEEHCASPEDKTLEVVSPSQSVTGSAGHTPYYQSPTDEKSSHLPTEVIEKPPAVPVSFEFSDAKDENERASVSPMDEPVPDSESPIEKVLSPLRSPPLIGSESAYESFLSADDKASGRGAESPFEEKSGKQGSPDQVSPVSEMTSTSLYQDKQEGKSTDFAPIKEDFGQEKKTDDVEAMSSQPALALDERKLGDVSPTQIDVSQFGSFKEDTKMSISEGTVSDKSATPVDEGVAEDTYSHMEGVASVSTASVATSSFPEPTTDDVSPSLHAEVGSPHSTEVDDSLSVSVVQTPTTFQETEMSPSKEECPRPMSISPPDFSPKTAKSRTPVQDHRSEQSSMSIEFGQESPEQSLAMDFSRQSPDHPTVGAGVLHITENGPTEVDYSPSDMQDSSLSHKIPPMEEPSYTQDNDLSELISVSQVEASPSTSSAHTPSQIASPLQEDTLSDVAPPRDMSLYASLTSEKVQSLEGEKLSPKSDISPLTPRESSPLYSPTFSDSTSAVKEKTATCHSSSSPPIDAASAEPYGFRASVLFDTMQHHLALNRDLSTPGLEKDSGGKTPGDFSYAYQKPEETTRSPDEEDYDYESYEKTTRTSDVGGYYYEKIERTTKSPSDSGYSYETIGKTTKTPEDGDYSYEIIEKTTRTPEEGGYSYDISEKTTSPPEVSGYSYEKTERSRRLLDDISNGYDDSEDGGHTLGDPSYSYETTEKITSFPESEGYSYETSTKTTRTPDTSTYCYETAEKITRTPQASTYSYETSDLCYTAEKKSPSEARQDVDLCLVSSCEYKHPKTELSPSFINPNPLEWFASEEPTEESEKPLTQSGGAPPPPGGKQQGRQCDETPPTSVSESAPSQTDSDVPPETEECPSITADANIDSEDESETIPTDKTVTYKHMDPPPAPVQDRSPSPRHPDVSMVDPEALAIEQNLGKALKKDLKEKTKTKKPGTKTKSSSPVKKSDGKSKPLAASPKPAGLKESSDKVSRVASPKKKESVEKAAKPTTTPEVKAARGEEKDKETKNAANASASKSAKTATAGPGTTKTTKSSAVPPGLPVYLDLCYIPNHSNSKNVDVEFFKRVRSSYYVVSGNDPAAEEPSRAVLDALLEGKAQWGSNMQVTLIPTHDSEVMREWYQETHEKQQDLNIMVLASSSTVVMQDESFPACKIEL

SEQ ID NO: 1655 - DNA, 742 bp, Homo sapien
caaaagcgaaactctgtctcaaaaaagaaaaaaaagaaaaaaaagcacgtgaccttatgaggctctcgctgtattgttattttaaggactataaagagtttgatttaaaattatgcagggcccctatgtgggattttttaaaaagcaaactggtgtgtattctcatgtggtttgcacagcccagcctcacagcactattgtaaaccctgctctttctgtctcgctagacagatttttttgtttgttttcttttttctggttgttttttgttgttgttgttgttgttttacagctgaaaccaaccagcaagcccttgatgaccaagaggcgtttctttcaaagctatagggcacaaacaattgaccatagatgactccgtttgcattcttctgcagaattatttccttcagggacagattttccaacctaagaaactacctaccgtgtgtattctcttgacggggagagatgaacccttcagctgctaagatccaagaaaacgcctcactgccttaaccttaactgttcttcctggcgctaaaaagagctgtattttttaaagtgctggggcaaacaaagcaaccccaaaagagttgatgtgtgttttaaaagaaaaaacccaatgaggaacaattggagatttttatgcagaaactaaataatccttaataaataaatctctattttggaatcaaaaaaaatctatgtcgggtgcggagaaagaggtaatgaaatggcagga

SEQ ID NO: 1656 - protein, 66 aa, Homo sapien
KAKLCLKKEKKEKKARDLMRLSLYCYFKDYKEFDLKLCRAPMWDFLKSKLVCILMWFAQPSLTALL

SEQ ID NO: 1657 - DNA, 1865 bp, Homo sapien
gttgtttttgagatggagttttgcttttgtcacccaggctggagtgcaatggcgcgatctcggctcactgcaacctccctctcccgggttcaagcgattctcctgcctcagtctcccgagtagctgggactacaggctcctgccaccgcgcccggctaatttttttatgtttagtagagacagggtttcaccatgtttgtcaggcttatctcgaactcctgacctcaggtgatctgcctgcctcgccctcccaaagtgctgggattacaggcgtgagccaccgcacctggcctctcatgtttttctataagcagttaagagaagccacacagcatcctgaacactttgctttctatctcttctgccaaatatcctaggtcatcattcttaagttctgccctccatgaagtcctaggaaacgacataattcaggtgtcctgatggcaaatttcaagggccacgcgcttccagggagtttcttcctgatcattgggctgtgttggtcagtgaagtacccgctgaagtactttagccacacgcggaagaacagcccactacattactatcagcgtctcgagatcgtcgaagccgcaattaggactttgttttccgtcactgggatcctggcagagcagtttgttccggatgggccccacctgcacctctaccatgagaaccactggataaagttaatgaattggcagcacagcaccatgtacctattctttgcagtctcaggaattgttgacatgctcacctatctggtcagccacgttcccttgggggtggacagactggttatggctgtggcagtattcatggaaggtttcctcttctactaccacgtccacaaccggcctccgctggaccagcacatccactcactcctgctgtatgctctgttcggagggtgtgttagtatctccctagaggtgatcttccgggaccacattgtgctggaacttttccgaaccagtctcatcattcttcagggaacctggttctggcagattgggtttgtgctgttcccaccttttggaacacccgaatgggaccagaaggatgatgccaacctcatgttcatcaccatgtgcttctgctggcactacctggctgccctcagcattgtggccgtcaactattctcttgtttactgccttttgactcggatgaagagacacggaaggggagaaatcattggaattcagaagctgaattcagatgacacttaccagaccgccctcttgagtggctcagatgaggaatgagccgagatgcggagggcgcagatgtcccactgcacagctggaatgaatggagttcatcccctccacctgaatgcctgctgtggtctgatcttaagggtctatatatttgcacctcctcattcaacacagggctggaggttctacaacaggaaatcaggcctacagcatcctgtgtatcttgcagttgggatttttaaacatactataaagtctgtgttggtatagtacccttcataaggaaaaatgaagtaatgcctataagtagcaggcctttgtgcctcagtgtcaagagaaatcaagagatgctaaaagctttacaatggaagtggcctcatggatgaatccggggtatgagcccaggagaacgtgctgcttttggtaacttatccctttttctcttaagaaagcaggtactttcttattagaaatatgttagaatgtgtaagcaaacgacagtgcctttagaattacaattctaacttacatattttttgaaagtaaaataattcacaagctttggtattttaaaaaaaaaaaaaaaaaaaaaaaaaaaaaaaaaaaaaaaaaaaaaaaaaaaaaaaaaaaaaaaaaaaaaaa

SEQ ID NO: 1658 - protein, 275 aa, Homo sapien
MANFKGHALPGSFFLIIGLCWSVKYPLKYFSHTRKNSPLHYYQRLEIVEAAIRTLFSVTGILAEQFVPDGPHLHLYHENHWIKLMNWQHSTMYLFFAVSGIVDMLTYLVSHVPLGVDRLVMAVAVFMEGFLFYYHVHNRPPLDQHIHSLLLYALFGGCVSISLEVIFRDHIVLELFRTSLIILQGTWFWQIGFVLFPPFGTPEWDQKDDANLMFITMCFCWHYLAALSIVAVNYSLVYCLLTRMKRHGRGEIIGIQKLNSDDTYQTALLSGSDEE

SEQ ID NO: 1659 - DNA, 5845 bp, Homo sapien
  Unsure 4720-4750: Unknown base
tttcggagttgcgaatcctgtcaccagttggaaagagggggtggagcccgggccttgtcaagtgtgaccaaccagcgagaggagcggactttgcggggtggagccctgaagccctctcccaatcgcacaagtgtaggggcggggcattctttggggggcccaatgaggaacgcggccgaagctggcctgtcaagagaaggggctgggggcggggagatggtgagtcggggataaacactccgcggcggtggcggctgctgctctgctccgggttctgtcactgtgtcggcggtgcccagctcactggccccctccctctcttgtcgagcgtggttgccagagaggctccctcagccctgctccgcggggtccacagcgggctccacagcgggctccatagcgggctccacagcggtccggcggcggcagcgagcccgtgggcagtgggggttggtcccgtggctccggcccccggtgcagaatggcggcggcggttcggatgaacatccagatgctgctggaggcggccgactatctggagcggcgggagagagaagctgaacatggttatgcctccatgttaccatacaataacaaggacagagatgccttaaaacggaggaacaaatccaaaaagaataacagcagtagcagatcaactcacaatgaaatggagaagaatagacgggctcatcttcgcttgtgcctggagaagttgaaggggctggtgccactgggacccgaatcaagtcgacacactacgttgagtttattaacaaaagccaaattgcacataaagaaacttgaagattgtgacagaaaagccgttcaccaaatcgaccagcttcagcgagagcagcgacacctgaagaggcagctggagaagctgggcattgagaggatccggatggacagcatcggctccaccgtctcctcggagcgctccgactccgacagggaagaaatcgacgttgacgtggagagcacggactatctcacaggtgatctggactggagcagcagcagtgtgagcgactctgacgagcggggcagcatgcagagcctcggcagtgatgagggctattccagcaccagcatcaagagaataaagctgcaggacagtcacaaggcgtgtcttggtctctaagagagtgggcactgcggctgtctccttgaaggttctccctgttggttctgattaggtaacgtattggacctgcccacaactcccttgcacgtaaacttcagtgtcccaccttgaccaaaatcagctttgtaactgttttcaaggaggtgcttaggattgtgggtttctgattgcatccactagcttctctttttctcgccataaaaatttgtctctgagagactatacattccaatcaatttgaagcatccaagaattcttagaccgaataagcaatgtccacatctcagcaatccccctctttgctctcctcgtgtcctctcccagacctttcttccagttttctggcttactgtgttacttgcctaggaggaatgtccaagtgtgtcttgtacttaggaaactgaaggaaacaaacttttgaaattgagatcctgatctcagaactccaaagtaagctttgaaagcagcatttaagagcacttaaccatggacctcaccaccagtgaggaagtcaggaatacctctagaaaacacgcccttcacaccgcgcatgctcattcccccgacgcgccgcgtgtggatgggagcagtatttctcactttaaaatggacaccttgatagtgtgtctctggggttgcacagctcatcaaagttccaaattgtttgttctcacaaacaaaacggtacaatctatttttgtgcgatgttcttgggacctcgctgtgttctgctatctcgaggcacattctcccctccaactttgttaatgctacttgtctctggaacatttttttttcctacctcagagataaatgagatctccatttcccacttaacacagtgattatccttttttccccccccaaaatagtgacatttggtccaattataatctattttcctattgaactttcagcaataactgagctgtggcactagcagagctagtagccattatcagtgaaagaaaaagtccacatttctactctctgttgcaggtgaacaggagaggatggtacactgttactagaactcctctccttattgattatttttggacacacccagaaacttctttatggaggcttttgggttgatagtttaaaaggctgatttttctttttggttatgatttctcccttaagtggtctccgactttgtagcatttttatttaagctaaaacagagcacatgtatatgtacataagacacattaaatctataaatactatttattcattttatataaactaatgtaatggaaaacaaattcttatgactttgtggttttatagatgttctagaaactttgtatgtaggtatctacaaaattagttcattcccctgaatatttttgcattcatatttttgaggtcttgatgttttcagcctctggcgaatctttttcattgaatttgaaccatttgtaaaatctgtgatgctgaagcagagtgtgtcacaaagtgatgagaacattactaaaatccacggacgcactgcgacctaagggctcaacggctgactcggcagcgggcagccaccccacgctcccctgcggtcactcgcacaccacagcctgaagctcccccagcgcctgcacctcgcacacagctaaggtcaaagttcaaacgcactccacacggaagctcattctatacccgaagagcagtctcagaaagcaagattacttttgtgttttttaaaaaatgattctttaatgtatttttctaaacattctgattggaagtagtggattcctaaatgattccaaagtcacctgtaattcttctgtttttgttttgttctgtcttttcttcattttggctttgggtggggggaggggcaggtgacacaaaggatttttttttttttttttaatttttggaatcttttccaataaccagctaaagatttgcactgaaatacaacttgtatgccttttgcatttttaaagcctgcttcctggatttaagcagagtgatagtgttcaaagagccagttcagcctgtaacatatttgaaaaagatatgtctgcactttgaggtcccttttgaatgccattcactagacctctcaagcattttgtttcattgctacatccaagcgcctcacaagtccacaatgcgggacagcatcaaaagctcaagactttggaaaaagcttgtgggcttgcactgggggagggaagggaacaaaatttgtgtacttctttgtttaatttagaaataaggcatccaagagatgccattattttctgtgtttcaattgttgtgcctttgagttaaactgcatttttgtcttttggttgaaatctgaaatgtactgtcccaatataaaacagtaattatttgacctttgcactgtttgtctggtccttttcagtttgattgcatataaatgtggaacttgatagatctctatatttttaatgcacttgtgataaactggcagcagggttagacattactttcaaagcttgaggtagaccgagtcagcatgctagacaggcttctctctctaaccaaaactgtaatcttcaggaccagcaaactcagcccaaggcagctaatccccccaaccccatcctccgcgccccgtgcggctgatcggcagccctgattcgccaatttgtcctctctcattcactgatccaccagcctgactgctaagagctatagtctttttagttgttttgtctttttaagcaagatgaaaacctttctattagggattttggggttgggaggggatgggcagagatataaaccccagcctttaagactttgacaattgtacgtaaatacagatgtgtataaatataggcacatgcatatttttatgtgaaagttgattttaaaaaactaaaaaaatctaaactgcactcttattgataccatcataacgcaagtgggaaaaataagagtacgcagtctaatttaatttcatgcagtgggaaaatatatatgtgtgcttctgtaacatcctgaaaacatagctttccatcccctgttggctttgaatggtgggccgagcacccaggtcgtctgtattttggttttcttttgctaagcagagatcttgaattcttcaaggtgctgatagcaactgctggctcctttctgtagtcacacacctaatgctagtttagtgattcaaaatgcatcacatttttaggcaggacctagattttccctgtcaacctaagatgaaaataatttcagtgttgattcagaactgaacattaagtaggccctcgtcctgcagttggccacttgagtgttttgttttgtttttattttttaaggtgggcattttcctttaacctctactttttcaaaagcaacaaaggggcctcaacctgagtttcctatgggcctctcttctgcatccccaaagcggccaagagcaaatcctgggggataagaaaaaagtgtaaactaggtaggattgtgatgctcaaaataaccatctagcaatatcttggagcttgagaatagattttgtgggcttatttcttcttgcctcttccccatcctttcaagagagaacttatttttgaaaagtatctnnnnnnnnnnnnnnnnnnnnnnnnnnnnnnnttattatttaggtttttataccatactgtattggcgagaataccactatcattgtcctttacagtctatttcttcccccaagtcttggtctttttttattttctattttttcatgaaccacacaggagactttaacatcctggtcttttctgtttcttctttgtttccccaagtttgtctgtccccctttgccttccctgagtgttgaacatcaggtagtaaaaggctaaacgcaatttcttgcatgtcaatctattctttttctatgtttgactctgatgcagtgtgtttagcgtgtctagtagctggctactcctatttaaaaactcttcctggtagaagacaacccaaagacccttttcgatgaggtggtttctcattctacatcctctgatctctatagactgtaggatgctttgctttcaaagataactgggttagagggtggggtgtgcaataggtgatttatcatggtttttttcattatcaatattacatggatgattttctcagattcttctgaaagaagaaattgacaggcactgctagattcagctattgaatggctgaagagattgagtatttgaccttctctcaaaatcataaagtgagaattcataaggcacccaatgttaagatttatccagatttttacattttgatttcttctctctgtggggtggcaagttgagggagcattcttcattttagcttttacctgacaaccaaacttgcctttaccccatccctagaattggtgctcttggaatattgctgttaccatcatttttggggggccatcttcctaatgctacacacagcctgacaggggagcagcagatgaaagggtatgctattctgtttccagatgtttctttatgtaaatatgacgccaatgtaaatcctgtgtcaagatcatagagaatggtgctttttactacagttagcacatgcatttttagaaactactacatgttttagagaatctttgctgtgtatatgtaaactgtattgttcaactgttaacaaataataaattatttcattattaaaaaaaatctatgtcgggtgcggagaaagaggtaatgaaatgca

SEQ ID NO: 1660 - protein, 215 aa, Homo sapien [sequence omitted]

SEQ ID NO: 1661 - DNA, 1107 bp, Homo sapien
cgggcgagaagggcagacgggacatgcagcctcttccgcctgagccccggaagtgatgtggctgcggcatcgcggcctcgctatgtctgccattttcaattttcagagtctattgactgtaatcttgctgcttatatgtacctgtgcttatattcgatccttggcacccagcctcctggacagaaataaaactggattgttgggtatattttggaagtgtgccagaattggtgaacggaagagtccttatgttgcagtatgctgtatagtaatggccttcagcatcctcttcatacagtagctggggaaaatgccagaatgtagttgccatcagatttgattgtgaacaaggactgactgcagaaaataatggaaaggatgtttaactcttttatctccgaacattgaatgagataaatttccagatgctgttctctattttaatgttattggaccaatgttctgtataaacaattaagatgtaaccatttaatagtctgtaacaatcaacctcagtactgtcactacaatattacattctgcaaatgttattctgttgtatcagatacaaaattttagtgaggtatctctaaggcacatagtagaaaacaaaattggttaattactcaagttcctttcactgtgatttggaaatgatttaatctttatagaatgagaaccttttttggactagcttttttattaaaatggctcaatttgtgttgataaggattgcattaatatttaatagtgcttgcttttcctctgggcacaccattttgatcattaaccagagtacctctactcttagcaaactctagtttatgacaagtatttaaaatatttaaaacaagcttatgcagttcttaaggacgaaggtaaatgagatgtaacttaaaaatagtattgggaaaatgttgatagttaacattagtggatttagactagccaaatgacatagtaggctctgaaacatcttgtcaagtatatgtattttgtgcatgaatttttgctggaaagctgtctttctctgaaaaacacaacgttcttagaatgaaaagaacaattataaaataaaaaaaaaatttaaaaaaaactgggcggggg

SEQ ID NO: 1662 - protein, 72 aa, Homo sapien
MSAIFNFQSLLTVILLLICTCAYIRSLAPSLLDRNKTGLLGIFWKCARIGERKSPYVAVCCIVMAFSILFIQ

SEQ ID NO: 1663 - DNA, 891 bp, Homo sapien
cctgggccagcatggcggcgcccatgtaacccggtccgtgccgcaaagcgaacggcggccgcggcgcgggccccgcgggggttagaggtcaccatgctgagggtcgcgtggaggacgctgagtttgattcggacccgggcagttacccaggtcctagtacccgggctgccgggcggtgggagcgccaagtttcctttcaaccagtggggcctgcagcctcgaagtctcctcctccaggccgcgcgcggatatgtcgtccggaaaccagcccagtctaggctggatgatgacccacctccttctacgctgctcaaagactaccagaatgtccctggaattgagaaggttgatgatgtcgtgaaaagactcttgtctttggaaatggccaacaagaaggagatgctaaaaatcaagcaagaacagtttatgaagaagattgttgcaaacccagaggacaccagatccctggaggctcgaattattgccttgtctgtcaagatccgcagttatgaagaacacttggagaaacatcgaaaggacaaagcccacaaacgctatctgctaatgagcattgaccagaggaaaaagatgctcaaaaacctccgtaacaccaactatgatgtctttgagaagatatgctgggggctgggaattgagtacaccttcccccctctgtattaccgaagagcccaccgccgattcgtgaccaagaaggctctgtgcattcgggttttccaggagactcaaaagctgaagaagcgaagaagagccttaaaggctgcagcagcagcccaaaaacaagcaaagcggaggaacccagacagccctgccaaagccataccaaagacactcaaagacagccaataaattctgttcaatcattaaaaaaaa

SEQ ID NO: 1664 - protein, 257 aa, Homo sapien
MLRVAWRTLSLIRTRAVTQVLVPGLPGGGSAKFPFNQWGLQPRSLLLQAARGYVVRKPAQSRLDDDPPPSTLLKDYQNVPGIEKVDDVVKRLLSLEMANKKEMLKIKQEQFMKKIVANPEDTRSLEARIIALSVKIRSYEEHLEKHRKDKAHKRYLLMSIDQRKKMLKNLRNTNYDVFEKICWGLGIEYTFPPLYYRRAHRRFVTKKALCIRVFQETQKLKKRRRALKAAAAAQKQAKRRNPDSPAKAIPKTLKDSQ

SEQ ID NO: 1665 - DNA, 1088 bp, Homo sapien
ggaattcggcacgagcccgattccgcgcccgccatggccgacaaaatggacatgtctctggacgacatcattaaactgaaccggagccagcgaggcggccggggcgggggccgcggccgggccggctccagggccggccgccgcggtggggcgcaggccgccgcgcgagtgaatcgaggcggcgggcccatccggaaccggccggccatcgcccgcggcgcggccggcggaggcggcaggaaccgaccggcgccctacagcaggccaaaacaacttcccgacaagtggcagcacgatcttttcgacagtggcttcggcggtggtgccggcgtggagacaggtgggaaactgctggtgtccaatctggattttggagtctcagacgccgatattcaggaactctttgctgaatttggaacgctgaagaaggcggctgtgcactatgatcgctctggtcgcagcttaggaacagcaaacgtgcactttgagcggaaggcagatgccctgaaggccatgaagcagtacaacggcttccctctggatggccgccccatgaacattcagcttgtcacgtcacagattgacgcacagcggaggcctgcacagagcgtaaacagaggtggcatgactagaaaccgtggcgctggaggttttggtggtggtggaggcacccggagaggcacccgcggaggcgcccgtggaagaggcagaggtgccggcaggaattcaaagcagcagctttcggcagaggagctggatgcccagctggacgcctataatgcgagaatggacaccagttaaacagaccagcaaatccgcgtgcggaacaggacccaggcgtctcctcttgctccctggttggggggcggtggctggggctgtgcgcccaatgatggatttgtttcttttatgttttaaaataggatttaaaaactcatgtaaaggttttttttttttcttttttttttttttaattctgaaacagacctgttttgtaccgagttatttttgggataaattttactggttgctgttgtggagaaggtggcgtttccaccttttccataataaaatagaaatgtgtgtaa

SEQ ID NO: 1666 - protein, 255 aa, Homo sapien
MADKMDMSLDDIIKLNRSQRGGRGGGRGRAGSRAGRRGGAQAAARVNRGGGPIRNRPAIARGAAGGGGRNRPAPYSRPKQLPDKWQHDLFDSGFGGGAGVETGGKLLVSNLDFGVSDADIQELFAEFGTLKKAAVHYDRSGRSLGTANVHFERKADALKAMKQYNGFPLDGRPMNIQLVTSQIDAQRRPAQSVNRGGMTRNRGAGGFGGGGGTRRGTRGGARGRGRGAGRNSKQQLSAEELDAQLDAYNARMDTS

SEQ ID NO: 1667 - DNA, 5583 bp, Homo sapien
gcgcgcggggcagccgcgtggctaggcagacggggccgggagcggcgcgcgcgcgccccgccagcctctggcgcgcccccggcggcatgagccgcagcgtgctcgcccccgccgccagctcgcctcacttatgggtcggaaacgctgcgtgggggagactgttccaagatggcggcgggttgctgcggggtgaagaagcagaaactgtccagttcgcccccctctggctcgggtggcggtggtggcgcctcctcctcctcccactgcagcggagagagccagtgccgagctggggagctgggactaggaggcgccggtacgcggctcaacgggctgggaggtctaaccggaggaggtagcggcagcggctgtaccctctctcccccccagggctgcggcggctggctggcggggggatcgccctgtcgccacctccgagctgcggagtggggaccctactttctaccccggccgccgccacctcttcctcaccctcctcatcgtccgccgcctcgtcctcatcgccgggctcccggaagatggtggtgtcagcagagatgtgctgcttttgcttcgatgtgctctactgtcacctgtatggataccagcagccccggaccccccgattcaccaacgagccctacccactgtttgtaacatggaagattggtcgagacaaaagattacgtggatgcataggtactttttctgccatgaatttgcattcaggactcagggagtacacacttaccagtgcccttaaagatagccgttttcccccaatgacaagggatgagctgccacggcttttctgctcagtgtctctgctcactaactttgaagatgtctgtgattatttggactgggaggtgggtgtacatggcattagaatagaattcatcaatgaaaaaggatcaaaacgcaccgccacctacctaccggaggttgcaaaggagcaaggatgggaccatatacagaccatagactccttattgaggaaaggaggatacaaagctccgattactaatgaattcaggaaaaccataaaactgaccaggtatcgtagtgaaaagatgaccctgagctatgctgaataccttgctcatcgccagcatcatcatttccaaaatggcattgggcatccccttccgccatacaaccattattcctgacactgagccgcacaaccagtcactgggcctctctgcagacctcttcccaggagaccctacaccttcttggtctagctatctcttttactgtaccattttatgatgatagtttccgttgccatggtgaagcttcggacatcgtcaactaagatcatcatgggtaacgggtagaaaaatgggcatttgttaagatcctgttttattattttagatcgttgattttttttttgcagcatatataattttgggtttttttttccttataatattatgtagaattttgctttgctgtctcagtcaggtttctgtttttctgtcctccttgcctttcttcccgttttgcttcctgttttccttcttccttcccgttttccttcttccttccctgcctcccttcctttgactgtggatggaagaaagtgtgcagtttttagggattttacttaggttcgtctttagttttcctcagtaagatagttgttttttgatacctgagtttgggattaattcatatcaaattcaggtatttgtatattactcttgatttttgtctgaaattcactttgctatgacagcctagtagttgggtcttcactccttaagtatatgtttttcccatggtgaaaatacatgaactttagttctagtagtgagcattcaaaggtccgtgatagggcttgtcacagagagagagaaatcatttatccctattgtgctggttatcatagaagagactgcctcaccactttatagaaccaatttgcaaactaaaacactgtttggagaaggtacaaactacctttcaaaaaggctacaggaaacattttatgagcagcaaatattaggaagagagcagatacagaatttagtgcctttgagaagaatataattaagtggaattaagaggggttagaaaaaaggcaatttagaaaaatattcttgtaaaactttattgtttctatatgtgaaacagaagattagacaaattccttactcttaagtatttttttaagctgaaaaaaaattattttgagcaaataaccaataagagacatttgtctattttatattaatttaaatttgttagctctaggtttcaataagtcatgattggctagaatccattttagctaccatctaaagatatggtaaagataatttagtaaaacaaaagttcatatttgccatgatttcagatatgtttgtcatggggacaatattagagttttagagatactataaaatagcttgaatttctttctgcactacatacttttgatagaaacacatttactacattgataagatgttatgtcacacctgtgaaaatggagttggcattcagatatgctatagttagagcccagctcatctgcaagtatagtcttcccatgatgcatacaaagataacttactgatgtcgataggaggtccatacatatatccccaggaaaaatgacagattattctggaggaagatgaccttcattttagagctttcaaactggaaggagccttttggagtaaaatatatataattttttcaaataggaagccaacatatcaagtgatgaattaaagtatgctgcagaatatatattctaaaactacaaaaaagtcactgaatatcaaaatgatacagcttatacatatagttactgtgacaagtgacagactgctagttcagaattcaaaaatcctttcctagtttgtgagataatgggctaaattccttctgcctgccactggggcaaagcaaattgctttagtttttgatgagagttcttagaagtttgttggtattccttcatccacagcatccattgttgaaataaccattttcagttgtgatgccttaactaagaagccaattgttagcctgaaatgcaatcttggtagccagtttcaatgaagctagagattagtcagaaaaagttagctgttgggctttagaaagggattttgagtcctgtcatttctacttgggagcattttggagcagattagtctttcagtataaaaacaagtggctacctgatggaaacttttcttacccttatagggaaactgagcacaagctgaatgatattgtctgctgcaaaaaaaaaccataccaaaaaaaaaactcaaaccaaaaaacaaaaaaaaggaaaaaaaggtaaataaaacaagcaaactgaagagagacaaaatagaccaatattatcgtgaaatccatcttatccatcatctcatcggttcaacaggctcctcgtcctgggtgagcttatggttagaagtttttttagcaaagatttattacatacatagatgtgtgtgtgtacatatacttacacatacttactatacatatatgtgtgtttatttaacggtgctaatcaatcttgagcaggtcacgtgactggtcatgcggactctaaaatcatatcagattttttaaaatccttgatatatgcagatgttatacagattttcttagcagtgtaataacgttaaactgaagaaataaccatcctgcaggcttcaaaggacgaggtcagcaatatttcccaacatggcttgggggaaaaggatagttttgtctccttttgtattcaagtaatgcaaagtgcatttttgtctctaagtagcttttgactaaaagactttgtagtgtaaagggtgttatacaaactgtaatggtgtgcttcaaacaaatgctagaccctttcacctttgtcgtatatacaaagctgttaattatgtggtatgaattaactttgaacatgttgaaatatgtagcatgtctttaactcagacgaagattctgattgcacaggttgtgttctagccagttgtgatttatttgttcagaaacacaaatgtgaattgcactcttatcatcagaatattgtatgagttcagtgatctttaaacagctcagaagtaatacttgaacttcatttgagtagcacaaagtttacatagccccttttaaatgttaattcgttccatttaagttttccattttcagatgcaactgggtatttttcctcttggaaatagtacgtactttgctttggtatgtagcaaaaggcttccatttctggaagggttttcttgttcttaaacaaggtcagccaggtaccagattctaaaagaacaaattgtcccccacccctcaagtggccttctgactgcacgagaatgtgctactaccctctgtagtctcccctaacacgagaggtcagtgaaattgatggaggaagtgcaaggcttgcttcccctcacccttaaagcttaaagcagttgtaagattttcagtccagcacatacagtcccagtgcccagcacaccggaagtttgtatactggcctcttatcttgtcttcaaatgtgcaggaaatttgaaactgtcatctggaataggttccatctcttatgtgtgttagatcaaaccaaagaagcccccagccatgcccaaatgctgcttcaaaagcctgccttccagtccttacaaaaaccttgcaggattaaatgtgttaacttttttatttttgtacagtttctaagtgatttttgctagtgatgttaaaatgaattaagtttatttgaggggtgtgagcacctcctccatttaaataaactggtgactttccttttattttttaaaagtggaaacccgttgtgtgcctctcgatttaagggtttctgatgacattattcttaagaccagcattgatcctttatatacaaatatatgttttccttgttttttattgctatttcagaagaaaatgaaccttttattttgctctacccagtaactgcgctggtacatagacgcactgagcaaacaaacttttgtaaccacctctgactacttttgtatatcaaagttgattacttttgaaatatttggatctagtttctaagttattttagtgttttatatgttccccaaaattactttgaatctgtcaccagcataatgagttcttggtgatacaatggtgagacttgtaatgagcaaaaagctacctggagtagctcctcttttccttctttcttagtaacctgttttttgattaccgtaagacatcacagattacctgaaaccccttccagtataactaggccctccttccttccacatttaattgcttaatagtttgaagaaactattggaaatgggcattttatatgacatgtatggctttacaatattaaatatgagcaaaaagaaaaaatatgagaaggtttatgtgggtctgtaaggtatggctgtggaaagatattgtagtagttttgacactattgttattacctttaaaatcatttacccaataaaatgttaaaaccgagttatcattttatgtttcttttttaagtttaacctctctcatcataggatcttggtctcgtcggtactt

SEQ ID NO: 1668 - protein, 389 aa, Homo sapien
  unsure 119: unknown amino acid
ARGSRVARQTGPGAARARPASLWRAPGGMSRSVLAPAASSPHLWVGNAAWGRLFQDGGGLLRGEEAETVQFAPLWLGWRWWRLLLLPLQRREPVPSWGAGTRRRRYAAQRAGRSNRRRXRQRLYPLSPPGLRRLAGGGIALSPPPSCGVGTLLSTPAAATSSSPSSSSAASSSSPGSRKMVVSAEMCCFCFDVLYCHLYGYQQPRTPRFTNEPYPLFVTWKIGRDKRLRGCIGTFSAMNLHSGLREYTLTSALKDSRFPPMTRDELPRLFCSVSLLTNFEDVCDYLDWEVGVHGIRIEFINEKGSKRTATYLPEVAKEQGWDHIQTIDSLLRKGGYKAPITNEFRKTIKLTRYRSEKMTLSYAEYLAHRQHHHFQNGIGHPLPPYNHYS

SEQ ID NO: 1669 - DNA, 3719 bp, Homo sapien
ggcttctacagtccacaacacccaccagccccaggcccagcagaatgagcccagtgagtgccggggctcccagtttggctgttgctatgacaacgtggccactgcagccggtcctcttggggaaggctgtgtgggccagcccagccatgcctaccccgtgcggtgcctgctgcccagtgcccatggctcttgtgcagactgggctgcccgctggtacttcgttgcctctgtgggccaatgtaaccgcttctggtatggcggctgccatggcaatgccaataactttgcctcggagcaagagtgcatgagcagctgccagggatctctccatgggccccgtcgtccccagcctggggcttctggaaggagcacccacacggatggtggcggcagcagtcctgcaggcgagcaggaacccagccagcacaggacaggggccgcggtgcagagaaagccctggccttctggtggtctctggcggcaagaccaacagcctgggccaggggaggccccccacacccaggcctttggagaatggccatgggggcaggagcttgggtccagggcccctggactgggtggagatgccggatcaccagcgccacccttccacagctcctcctacagatctcacttcccacctctccaggattagcttggcaggtgtggagccctcgttggtgcaggcagccctggggcagttggtgcggctctcctgctcagacgacactgccccggaatcccaggctgcctggcagaaagatggccagcccatctcctctgacaggcacaggctgcagttcgacggatccctgatcatccaccccctgcaggcagaggacgcgggcacctacagctgtggcagcacccggccaggccgcgactcccagaagatccaactccgcattatagggggtgacatggccgtgctgtctgaggctgagctgagccgcttccctcagcccagggacccagctcaggactttggccaagcgggggctgctgggcccctgggggccatcccctcttcacacccacagcctgcaaacaggctgcgtttggaccagaaccagccccgggtggtggatgccagtccaggccagcggatccggatgacctgccgtgccgaaggcttcccgcccccagccatcgagtggcagagagatgggcagcctgtctcttctcccagacaccagctgcagcctgatggctccctggtcattagccgagtggctgtagaagatggcggcttctacacctgtgtcgctttcaatgggcaggaccgagaccagcgatgggtccagctcagagttctgggggagctgacaatctcaggactgccccctactgtgacagtgccagagggtgatacggccaggctattgtgtgtggtagcaggagaaagtgtgaacatcaggtggtccaggaacgggctacctgtgcaggctgatggccaccgtgtccaccagtccccagatggcacgctgctcatttacaacttgcgggccagggatgagggctcctacatgtgcagtgcctaccaggggagccaggcagtcagccgcagcaccgaggtgaaggtggtctcaccagcacccaccgcccagcccagggaccctggcagggactgcgtcgaccagccagagctggccaactgtgatttgatcctgcaggcccagctttgtggcaatgagtattactccagcttctgctgtgccagctgttcacgtttccagcctcacgctcagcccatctggcagtagggatgaaggctagttccagccccagtccaaaatagttcatagggctagggagaaaggaagatggactcttggcttcctctctctggctggcaaagggagttatcttctggaatacattagctctttcaaaaacccacccagtgtttagcctcaacggcagccagttaccagcttctctctgtagccttcagcagtgtttgcatctctgacataaccacaggctgctgttttcaagaagagcaatctgtttggataagaaaaacctttactttacagcttccctttataatttgttacacaggaatagttaaatgcatttgtttgtttgttttttgagacggagtttcactcttgttgcccaggctggagggcaatggcgcgatctcagctcactgcaacctccgtctcctgggttcttgattctcctgtgtcagccttctgagtagctgggattacagatgcctatcaccatgcctgggtaatttttgtatttttagttgagatggggtttcgccatgttggccaggctggtctcgaacttctgacctcagatgatctgcccgcctcagcctcccaaagtgctgggattacaggcatgagccaccacgcccagccatcaatgcattttttttattttttttttgagacagagtttcgcacttcttgcccaggctggagtacaatggtgcgatcttggctcactgcaacctccacctcctgggttcaagcgcttctccagcctcagcctcctgagtagctgggattacaggtatgtgccaccatgcctggctaattttgtatttttggtggagacggggtttctccatgttggtcagactggtcttgaactcccgacctcaggtaatccgcccgcctccgcctcccaaaatgctgggattagaggtgtgagccactgtgcccagcccatcaatgtgttttaaagctagctgtcagggttccacttaatttaaagctgggcagggagatgtgtaatgatttcaaagttaacacctgtttgttttctaaagggcatgccaagtcctgctgtatcagggaagtattctgtgctaaaatcagcgatggttcattgctctagtctctctcacccttctaggcagtgcatcagtcagctctaaatctggtgcagagggttaacagcataacccttgttggcaaaatggaatagatgttaagacctcaaatagggatttgggatgaaacagctgcagttagcactgttatctgagcatgaaagaactggaaacgctccttacgtcgagatgttggaccttgaagccctcctgaggccaacatgcaaatctggctgtgacggttcatctgacacctgtgtaaagctgaccagcctgctctgtacagtgacaatgaggagcccctctcttccttaagtaggaatctgtgaagcaaaatgtttgctgccaaagacaaatcagactgtcagtcattaaaaacagcattagcaggatgaggatagcaatggggaagggttgtgggcaatgcagtaacagggaaatggcttcagaaatggtttgagttggaagacaacattcttcatctctcaggacttctaattccttgatgctaaaagaagaggcatggattctatgagcttccaagtccctttccactttaaccttctacaaatctttcagaggactgcctagtagcaaaggttattcctggacacaggaaagacgggcattacagggaccaaagctctgaaaggtgacttttattaccaacacactggctggaaaagggacaaaccacatcacgggtgagtgatacttctcagtcttctctactcattcaacaaaggaaatgtgggctggggcagaggtcttttttcatttaatactggaaaaatattgaagagcatccatgttcacttatggctggttttgctatagaaattggaaaataaaggccacttttttg

SEQ ID NO: 1670 - protein, 477 aa, Homo sapien [sequence omitted]

SEQ ID NO: 1671 - DNA, 4636 bp, Homo sapien
ggtagcctctgttttcatttcagtcttaatgaaaactttctaacttatatctcaagtttcttttcaaagcagtgtaagtagtatttaaaatgttatacttcaagaaagaaagactttaacgatattcagcgttggtcttgtaacgctgaaggtaattcattttttaatcggtctgcacagcaagaactgaaacgaatggggattgaactgctttgcctgttctttctatttctaggaaggaatgatcacgtacaaggtggctgtgccctgggaggtgcagaaacctgtgaagactgcctgcttattggacctcagtgtgcctggtgtgctcaggagaattttactcatccatctggagttggcgaaaggtgtgataccccagcaaaccttttagctaaaggatgtcaattaaacttcatcgaaaaccctgtctcccaagtagaaatacttaaaaataagcctctcagtgtaggcagacagaaaaatagttctgacattgttcagattgcgcctcaaagcttgatccttaagttgagaccaggtggtgcgcagactctgcaggtgcatgtccgccagactgaggactacccggtggatttgtattacctcatggacctctccgcctccatggatgacgacctcaacacaataaaggagctgggctcccggctttccaaagagatgtctaaattaaccagcaactttagactgggcttcggatcttttgtggaaaaacctgtatccccttttgtgaaaacaacaccagaagaaattgccaacccttgcagtagtattccatacttctgtttacctacatttggattcaagcacattttgccattgacaaatgatgctgaaagattcaatgaaattgtgaagaatcagaaaatttctgctaatattgacacacccgaaggtggatttgatgcaattatgcaagctgctgtgtgtaaggaaaaaattggctggcggaatgattccctccacctcctggtctttgtgagtgatgctgattctcattttggaatggacagcaaactagcaggcatcgtcattcctaatgacgggctctgtcacttggacagcaagaatgaatactccatgtcaactgtcttggaatatccaacaattggacaactcattgataaactggtacaaaacaacgtgttattgatcttcgctgtaacccaagaacaagttcatttatatgagaattacgcaaaacttattcctggagctacagtaggtctacttcagaaggactccggaaacattctccagctgatcatctcagcttatgaagaactgcggtctgaggtggaactggaagtattaggagacactgaaggactcaacttgtcatttacagccatctgtaacaacggtaccctcttccaacaccaaaagaaatgctctcacatgaaagtgggagacacagcttccttcagcgtgactgtgaatatcccacactgcgagagaagaagcaggcacattatcataaagcctgtggggctgggggatgccctggaattacttgtcagcccagaatgcaactgcgactgtcagaaagaagtggaagtgaacagctccaaatgtcaccacgggaacggctctttccagtgtggggtgtgtgcctgccaccctggccacatggggcctcgctgtgagtgtggcgaggacatgctgagcacagattcctgcaaggaggccccagatcatccctcctgcagcggaaggggtgactgctactgtgggcagtgtatctgccacttgtctccctatggaaacatttatgggccttattgccagtgtgacaatttctcctgcgtgagacacaaagggctgctctgcggaggtaacggcgactgtgactgtggtgaatgtgtgtgcaggagcggctggactggggagtactgcaactgcaccaccagcacggactcctgcgtctctgaagatggagtgctctgcagcgggcgcggggactgtgtttgtggcaagtgtgtttgcacaaaccctggagcctcaggaccaacctgtgaacgatgtcctacctgtggtgacccctgtaactctaaacggagctgcattgagtgccacctgtcagcagctggccaagcccgagaagaatgtgtggacaagtgcaaactagctggtgcgaccatcagtgaagaagaagatttctcaaaggatggttctgtttcctgctctctgcaaggagaaaatgaatgtcttattacattcctaataactacagataatgaggggaaaaccatcattcacagcatcaatgaaaaagattgtccgaagcctccaaacattcccatgatcatgttaggggtttccctggctattcttctcatcggggttgtcctactgtgcatctggaagctactggtgtcatttcatgatcgtaaagaagttgccaaatttgaagcagaacgatcaaaagccaagtggcaaacgggaaccaatccactctacagaggatccacaagtacttttaaaaatgtaacttataaacacagggaaaaacaaaaggtagacctttccacagattgctagaactactttatgcatgaaaaaagtctgtttcactgatatgaaatgttaatgcactatttaatttttttctctttgttgcttcaaaatgaggttggtttaagataataataggacatctgcagataagtcatcctctacatgaaggtgacagactgttggcagtttcaaaataatcaagaagagaaatatccttagcaaagagatgactttggggatcatttgaggaatactaactctgttgcattaatgcttcaaaaaatcatcaaatgattcatgggggcctgatttgcatttgaaaaatgtttgaaattagagtctcatttgtttcaggaatgcagctacctgagttttttgtctcggcaaagtcacaaagcccatatactcacattgtgtgtctatatttgccaattaattctaaacttctaggaaatatgccctctcttaaaggagaattttttttaaatctctgagaaatgagattctgagtttatttcagctaaaaggttgcaattcttctgaagatatctcaaatataaggttgaaagttaagtgttaataatttttgtgaatttatacacacctaaacgttaagtacacaaatattttatttgttttacaaataaggaataagtaatttataaattaagaagttacctataaaaataaaaagataacaaccctatcatatagcttatttttaaattacctgaaaaacgatattctacactgtttcctttttgactctgagttttcaaactgttacttctcccatatttctcaatccatttcactcagttgcacagtcttttaaaccctgtaattgtcataccaaagtttctttttaaaaaaattactttaaatgcttagtttattcaaagagcgatccaataatataaaaggaacatgtgttaaacacaataaaattttaaatggctctaaatcaagcacatcaagagtatacaagtcttaaaggctttttaatacatactcttttcccatctatgtaacccaacttgcacatttcagctgcatgtggtgaatatgcatcatatatttactttaagaggtaagattttacttgcaaaatacatgtgcaaattagggatccatcagttgatggaagagatggactctagaatattatttcttgtggttattactcctttacaaagcactttcgtctcacttgatcctcataaggaaactaaggctcagaatgagtagagctgggttcagaatctagctcttctaactccaagccatctcctctttccactgcaggaaactgcctcttttgtcagtgaaataatagaaagattgtgttagttaagtgataactgtcatttgtttgaaaatgttcgagactgaacaaatagcatttaaactgctggcatatagatgagatattgtacttttgtgcaatgtttattacctttgattaaattgtaatgtgaagcttttactaggtgaatagttcattatgtagtggaggcttcgtggttgtccattgaattgtcacagcaaaatctataagtttcttcaattctacaagatagatccatatacctttgatcacttggagactctttttttgctggtttctagataactcaggtaaatcagacctttacagagtacagggctaggtgaaagaattactgaaaaatcaccttgaaaatccgaagggctgatataccctttatgttcctgactgatgcgcagaacctgggggaaatctacagcaatatacaggttgcaatgctgataacacaacagcaatcctctcctctacgtggacttactgttgtttttttaattattattggaatgggattttagaaaatagaagttacctttgtgtgtgttttagggaaggtagagaagaatctgctctttctctgaatactgttttgaccccaggcaggaccttggaaaggccaaaacattaacagtagtacttctgttcactgaagagttatgttacatgaagataaaatggttttgtcgtgtttattattgtattttgtgttgatataaataaacatggtaatttaaacaatgaaccttaaaaaaa

SEQ ID NO: 1672 - protein, 853 aa, Homo sapien
  unsure 27: unknown amino acid
GSLCFHFSLNENFLTYISSFFSKQCKXYLKCYTSRKKDFNDIQRWSCNAEGNSFFNRSAQQELKRMGIELLCLFFLFLGRNDHVQGGCALGGAETCEDCLLIGPQCAWCAQENFTHPSGVGERCDTPANLLAKGCQLNFIENPVSQVEILKNKPLSVGRQKNSSDIVQIAPQSLILKLRPGGAQTLQVHVRQTEDYPVDLYYLMDLSASMDDDLNTIKELGSRLSKEMSKLTSNFRLGFGSFVEKPVSPFVKTTPEEIANPCSSIPYFCLPTFGFKHILPLTNDAERFNEIVKNQKISANIDTPEGGFDAIMQAAVCKEKIGWRNDSLHLLVFVSDADSHFGMDSKLAGIVIPNDGLCHLDSKNEYSMSTVLEYPTIGQLIDKLVQNNVLLIFAVTQEQVHLYENYAKLIPGATVGLLQKDSGNILQLIISAYEELRSEVELEVLGDTEGLNLSFTAICNNGTLFQHQKKCSHMKVGDTASFSVTVNIPHCERRSRHIIIKPVGLGDALELLVSPECNCDCQKEVEVNSSKCHHGNGSFQCGVCACHPGHMGPRCECGEDMLSTDSCKEAPDHPSCSGRGDCYCGQCICHLSPYGNIYGPYCQCDNFSCVRHKGLLCGGNGDCDCGECVCRSGWTGEYCNCTTSTDSCVSEDGVLCSGRGDCVCGKCVCTNPGASGPTCERCPTCGDPCNSKRSCIECHLSAAGQAREECVDKCKLAGATISEEEDFSKDGSVSCSLQGENECLITFLITTDNEGKTIIHSINEKDCPKPPNIPMIMLGVSLAILLIGVVLLCIWKLLVSFHDRKEVAKFEAERSKAKWQTGTNPLYRGSTSTFKNVTYKHREKQKVDLSTDC

SEQ ID NO: 1673 - DNA, 5629 bp, Homo sapien
  Unsure 708-897: Unknown base
cgaagatccaagtttctttccatctgcctgaagaactttctttagcacttctggtatagcagacctactgatgataatttttcttttagtatatggtgattagtttactttttattcaactgtgtctttttttgaagtcttcttcattgaaatatattgttactaaatatagaattaatggctttctttaagcacttcaaagataatccactgttttctggactccgttgatacttaagtctttatttttgtgtaattctttttctttaaatgtgccatttttcatttttctctgactcctacctactaagatatttttacctaagtattgagtcagttttggttatgatgtgactcagtgtgtttttatttatattgtttggttgtttgaacttcttgaatctgtaaatgttgtgctttatgttaaatttggggggatttcagccatttaaaatataacttttcagtctcttccccctgggactccaatttttacatatgtattagacctattaatatttttctatggatacctgacattctttttaaatcttatttttggtgtttttcactttgaacaacctaataatttgtttccatccatgtttactcactgtttattctattttttcccaatctgctcttaagcctatcctgtgaattttctttttaatttattttattttttagttccagatattttctgcnnnnnnnnnnnnnnnnnnnnnnnnnnnnnnnnnnnnnnnnnnnnnnnnnnnnnnnnnnnnnnnnnnnnnnnnnnnnnnnnnnnnnnnnnnnnnnnnnnnnnnnnnnnnnnnnnnnnnnnnnnnnnnnnnnnnnnnnnnnnnnnnnnnnnnnnnnnnnnnnnnnnnnnnnnnnnnnnnnnnnnnnnnnnnntcgttgtgttgcccagctgtcttgactcccagactcagcgtcttcctgcctcgcctcatgcccgcgccaaccagttctttatttttaatattatgttgtatttgatgtgctatcctattcatttagtataagcacatttttctttatgtcttcagcataattatatgctttttcagaattttaacatcaggactgcttccagggtagctttattgccctttgtcttaagtatggattatagttttcattctttgtatgtcaagtaattttggattgtaacttgaactttgaatatactgtagaaactctgaattctattttattcttctaaaacaatatttctcagcttcagcactactgacattttgaactgggtcattttgtttgtgttgttgtgtgtattttgggagggtactgttctatatgcattgtggggtactgagtattatcctttgtctccactcactacttaccagtagcataactctctctcctccccacatcccctgccaaaaaatgccttcagtcctttctaagcgctcttttttatggtgttggggccaaaatcatgcatctttactcactctttctcattgagagctatggctataaagggtagtgatacttttacttatttatttttaaggcaagcagttaacttagctggattcaaactccaggctgcctcgtgtgctgtgggaagcagcctacgctctattcagttcttttcttttcatattggttgggttactttgagtctggcctacatgatgggcagtttagaggtcaaccaaaggatttcagcagaacttatacacagaatttcattcaggcttcccgtgtctgattggctacagtgtgggaatttcctcccacttttcagccactactgaggatgcctttcggcaaaattccttgaaattggaaacttacagggaaattcctttcctccaagagtgcgctctcctccagtgttggcttgcttttggttgttctccgtggttttagatagctgtctttatattaattctggagtttacagttgatatctgttgggggcttagtttgataacatgtattcttctattactagtagccagacctgtatgtcttacttgacctgatggagaaaagtttcaacttatgagacaatactgtgctagctagttttactgatttgtactctaaagtacccaagcctaaaatagtagagctgtctatcccacatgaaacttctctgattttcactgttttttataaaaagtatacatgttcacatttctgtaggtttttttaagcatcacaatttttataaactttctatatttccaaggtctacctgctttgtattttgcctagtgagagttttgtattcatgtaggaataatctcttggtgtgagtatctattttccactcatccaaaacagatagagcattgatttcactaagcgttatgttctagtttgctttggtattattattagaaatacctggtgattaatttgagctaagtattcttctctaccctcattcccagcattatcacccgcttttaccacttccaaggggtggaagcattctccacaatgcattttttcatgccagagaaaaatctagaaaaaaatgaataaaacgaagaaattctttccccttggtatctgtagctaacttgcctaagtgttctttcccacagtttaagtcttcagtccatagttcataagcaaaggggtgtagcgagctctgatcttgccagaagagagaataagtgagctaccccacggtggacattctggccatctgaaatgagtcgatgcatgtggcttttgtctaaaggctacaaataaaatgtaaccactttcttctttgagtagttgatatagcaaatagttgaaacagaagttttgattggcaaatcaggatgtggtagatactttaacaaagagtagaactattaccagttttatgtgttgctgtttgtatctctttcacagttttgataatatcacatcctggaaagtgaaacagaaaattattattccattttaaatgactaaatttgctttcatggtatttacagtgaaagagtaaattagaaagtgaatggatgactgttcatgagaaaaagcagggtaaaaagattttatttaattaattgaaaatattagggtcaaaacataggcttatgttatgttttgtgaattgtgctgtgttgtagacatttgatgagtcctaacatagaattgatctagctcttgaaataccatttttgattgagtataaatgggatataggcaccttacaacttcagaattcgaggaagatgatgtgaatcttccaattttatctatttgattcaaatggtatgttttttcacatttctcataatttccacgtcaactcccatgatgatcatgcaggaaagcagcatgattgcacttcttgtagtgcataccatcactaaaacatagttactgtctttctgtggtcttaagaaaaattcagaaacagcataccaatgtacatataagataaataagcttatgtggtacagtaagtgttctgttctgagaaataccttgattcgtatcctaatgtctgatgttattggtagttctcaaacttccccaattctgctttcatctaaattcatcttatctatctattgttaaataatctatcagtccatttttatctatcatctatatatctgtctttatcaatcattcgtctgtaatctatctgtgccgtttggcataagagacagaagggcatagcagtggaaactcaaaggagttacctccatgtgaatggacagtggtgatggtgatctgtgaggtggtgatgtatagaaagaaaaactagaagagagcatgccctaactcagggaccttgtccagcaggcactctggccttgttatactgtgcttgaatatgaaaaaaaaaaaaatcaaaatagtgctgacattctttgtcttctgggtctgagaaaacttagagtagatatgatgactctgccatttcagtcttttgtatttccacatttagagctcagttttaattatgtagaattatttctccagcctgtgttaaactagaccatggattggcaaactttttttgtaaattgccaaatacacattttcagttctgaaagccttgtggtctttgttgcagctaatctactctgctgttgtgttatgaaagcagccataggtaatttataattgaatgagtgcgctgtgcctttcttccaataaaactttacaaaagcatcctgtgggctggagtttaccctttgggaaaccagagcattggctaaactggaacctgaaaaaataatcacatcaactcagccacatggtaataatatttagagtattatttcaacattttcattttcataaaaatttttttagctcttttgccaaattccatctgtgagtgatacaaatgactaccacgtgccattaacatcacctaaacagtgcaaaacaagcatagtagaagtaattggaatgatataaaccccttgctgtaatagttatagttgataaattatgtttcaaaattgaacctatttcttccaaatttcatctataaagttccaaggagttccaaaatcttgcctgccttcttttcccagttagcagtattgtctctgagcagccatggtggtatccatcctccttggacaatgaatttagcctattttgacttcatttgagcagttgtaattgtttcaccacatcagagtaagattactacatgccagagctattctttaactcagcttgtaaaaacatgatagcatcaacaatatacatagcaaatgaatgccatctttaatccaattaaatggtttttacaaatttgctcttgtttgttgatgctatctgcattgcagtaattaaaggtgaggtaaaaagaatgaataaactgccaagttaaaattaaatttgggcaatttctcttttgcagtaatgtatgtatatttactcaaaacatatgccaaatttagtgttgaaaggctcattcaaatcaattgggaaagcacgtaaatgaacaattcataaaagaaaagcattgcaaatggccaagagcatagaaaatgtgctcaatcttaccagtcattataaggaaataatgaaatttgtgtatatatgaaatacttaaaatatatataaaataaaacaattatttgccttttttcacctatcagattaacagattatatgtgttaacaaggtggggagaatttacaactcctgatatgttaaaatctttcaggaaggtagtagaaaatatatgtaagatggaaattagcacttttgaccaacaattttagttttagatatttacctataaggatataataggaggtgttcaaagatgcatgtaactcaatgtagtattaattataattgtaaaatagtaaataacatttttgtcaaatcataatgttaggaaaattagtgatggcacatttaaccaattgaattatattcagttctgaataccgtgatgcatgttcaaattaattgatacaaaaatccaacaactttagcagtttgtttaccagttattgagtaccaactgtgttcaacattgttatttcactcatatgaaatgataaatgtatgtgcttgttatgatacggtcaataaaaccacttttataggaagaatacgcccaaaaaatctatgtcgggtgcggagaaagaggtaatgaaat

SEQ ID NO: 1674 - protein, 114 aa, Homo sapien
  Unsure 708-897: Unknown amino acid
MVLGPKSCIFTHSFSLRAMAIKGSDTFTYLFLRQAVNLAGFKLQAASCAVGSSLRSIQFFSFHIGWVTLSLAYMMGSLEVNQRISAELIHRISFRLPVSDWLQCGNFLPLFSHY

SEQ ID NO: 1675 - DNA, 5406 bp, Homo sapien
taacggtctaaggtagcgaggtcgttgccacgcagcgcccgagaggagctgggggaggacggtggcccgcgaggctcgtcgcagacaacgcggcggcgatgtccgcgagccaggcgagtgccgcggcggcagcggcggggccttgcgcgcggcagggcggcctgggcttcggcctccctccggttccctggaagcgggcccgcgaccagcgcgggagcagcagcagaggcggaggctccagcgcgtctctctcctccccctcagcctgagccgggggaagccaggcggcccgggtgtctggaggggggggggtccgctgcccgagaatgggaattctcttcactagaatatggagactgttcaatcaccaggagcacaaagttatcattgttgggctggataatgcagggaaaactaccattctttaccaattttctatgaatgaagttgtacatacatctcctacaataggaagtaatgtagaagagatagtgattaataatacacgtttcctaatgtgggatattggtggccaagaatctcttcgttcttcctggaacacttactatactaacacagagtttgtaatagttgttgtggacagtacagacagagagaggatttctgtaactagagaagaactctataaaatgttagcgcatgaggacctaagaaaagctggattgctgatttttgctaataaacaagatgttaaagaatgcatgactgtagcagaaatctcccagtttttgaagctaacttctattaaagatcaccagtggcatatccaggcatgctgtgctctaactggcgagggattgtgccaaggacttgaatggatgatgtcacgacttaagattagatgatctctactgacctcttctcatagattttgtataaatgaagtgctggactttacctgaaagctgcaaaaattaatggtttagatatatttataataaactgatttaaactttttctataagaagaaaaattaagaccacttatttgaaaacaaagatgaagtctcaccttccagtttgctttctcattagttttttccaaagtaagttattgaagctgtgattgacatttttctcataatgaatcctctcaggacattgtgtagcctatggtaagtacaaagggagaggaagacattttgaattttaagagctttattatcagtttaaccctccctagttgaatgttattttcttcttgttccattaagtcagaatacaaatcagcacagatattcgaatgtttccaatattttaaaatgtaatgttacttatgaaaagtattttgcttaaggttgtgtgtgtattgtgtatatacctcaagttcaagttaatggcattgatttatgttccagacaaaaataacacaaataataatatccttcgttataaccacaatgagataagtattggcattagtgttcagtgccattttatactttctctctgtgttctctgtattgtactaaccaacctcccaaatcgctgagctgcttgtttaaaaaaaaaaaaaaggaaaaggaaaaagcatgacattgtgtatcgattttttgttgttgaccaaaatcacacacatggaaacatgtaattcaacagagtgggaaagctagcagattcttggcttagtattactaataggcaggattgtacaatgagcaactatcagattattcctttcagtggttcttatggcatctaaattactgaataaattattaatccattaatcagtgaatcaaattatgattacaattatcaaatgaatgctcagcattaattgaaaactgttttgtgaaacatgtctacccagaaaagtagcattctataaatactattaaacaacttagctatattatttttaagtattaaattatatgtcaagcagttaaagtgaatttcagagtaaaagtaaggcatgtttctgagcaacattgataatttcttaatttgcaaatttcttcttattttggtacttggaatatagtgtgagattttttatttctaaattttgttgtatcttctattacataaatgcattgacaattataaaatgcaagtgttttttgaatgattttaagaatttggcttaaaaattgattgatacaacgtattatttgtactaagaagtaacttgacccaaaacaccttttatgtttgcttagggtatattttttcagtgtctgaaagtcaaaggtattcctgtcacaactgtaaacaaacttatcctaaatgtgttaaaacatattcttgggtactctatttatgtatctttcatgccttgaaaatctgaaggttaatccaaactcacatgttttagcatatttgagaaaaaaaaactaccttcaatatcagccttttaaatttcatgaagattttggtgaggaataatagtatatagtttaagtattgacaaaactttgaaagtttctttctttaaaatgggaaatactcaatatctaaatccaggtcaggcatgggatatcagtatttaacattggatgttttatgttttatatttataatgttcaaaatgcaagcataacatttaatatttgtccacatggttttacaaaagtaaatcttaaattactaagcttttcccatatgttctcgtactttctcaaatccctataaagaattacttgttatctattaaaaatctcctttacccaaatctgtattatggtttcgccagacaaatattatgtgatgtagcccagaaaatccacaccttttgtcctttttatgttttaatttgaataatcatgtgcttagtcccttggtttactgccacatcagtttaacacgatatcagcacattcccttgtcatcatcaaggtgttggctcagatttattcttaattggatgtttaaagcatgtactaccttgttacagttggtttagtgtagtggattattgacatgacatcatgagaagatgtgtaattttataccacatttataaaacatgattttgttttctacccttcaaggtaaacattaaaaataaggtggtacttgtgtacttgtacataaaaccaaaattatagttgggaaaaaaataaatttatatatgaaaatgtcaaaatcattttaaaagtattattttcaaataaaatggagaagctggtgaaaagtcatattggcaatttttatgtagtttaagtggaattaagcagagggagatgcttttgggtttttaatatgccacttctgagtgaaaacatctcgtggagtcattgtgttcagctctgagaagaataaagattcatagttctgtacatgtggctggatttaaatatcctgtttttgatactaattttgaaagtcatgtaacttcttttgatatctgggcaaaagtaaccatatgctataagcatttgaatatgtttaattttatcataatagcatctgtaaaagtacatcttacacattatatagagggttcttgtttgaaattttcagttctctttatcttcccagtacctcttggtcctcataatgggcaaaggatacaacgaaggcaggttgtataggggttatagtggggaagtggataggggattcattttcttatatgacattttgccttaagaatataaaagtgctttagcactgatggctggcatttttaatataggcagtgaaagtgactttagaagcatgggatgaaatagagggaagaagagtttttattttctggcctttaaaaagtgcctagtaggtcatttgagacccagagaaatgcacagagcttgagcaaaggcatgaagtccctgacattgttttcctttttgtctcagcatatagtattaagatgcctagaaataggactctattgttccctcttgtataggcactttacatttcttgttgtcactacagcaaccacatacagtacagacaacctccaaacctgtttatattagtgtaaatagaaaatctatagacaactttctagttttctctggaggcatttttgggaatgtacgtgtaataggctctgctttgtatacaggagataataccacatcatcggttatctccaaactccagtcttctctcaactgcccagttgtatgttgtcatcaatcactttttcaaggctgggtagagacaagtttctcctcgtaactttgacctctcccactctccaaatgtaatctggacctcattgctttcaaggtcagcttccccatagctcaggtatcctttgctctcctgtatcttcatttactattagtgaagagatctctgtcctggaggttattctaaactttctttgtaactattgttatagacaatggtttccaaaccagtggtttctatgtagcttttctagttccttgctatcttctcaccactggcttgaggtagtgatttggactttgctcattagagagcattatcagagatgtggagtccatcagaagaccagcttgcagtgtgtatagcatatagatgccaatattagaattctttaaattatatttaacattttcatgcttcttaatttaacttcacatgttgggaagtagattcagaaagataggagaaatacccagactctaccacttccgtgagctactagttaggcatgggcaggattaagttttatgtgtattatcttcccactaccaagaatggttatgtttcacagaataccagttcagtttgatttggaaaaagatgccaaaccaaatttatatgtagtctataatctaagggcattcttgaaactattgcccacatcccattttttttttcatgtttacttacaaaacagagataaacattagatgtctaaaggagttagtaatgaaaagcctatccttaaaaaataaacctgttgaaatgggctttaaagacatcgaaataatcacttgtcatgcattgactgtaaatgcagatagagaaatatgtctttgaagctccacttacacaaaaataaaacttgtatatcatgctccctcaaagaatgtgcgatagattattttaagaccatgataatagagtaaaaaggaaagaaagccagaaattacaattttggatgctaaaaagtaactttctagttaaccctaaagtcctgtcagattgtgaagaaatgttccaggatacacttggattagttatgcagtatttcttatcaatgtctagcccttgtatattgttctgaaaactaaagtttaaatctttatgctgttgcttgctagatatcctgttctttggtagaaaattcccatagtctgtactcaagaagtgcctaaaaatggatttgtgttgattttaagcccatctaataaattatatgtattttctatggtatcgtatggcttgtcttaactgatgacacagcctagaggatttctgtcacaatttgtgc

SEQ ID NO: 1676 - protein, 179 aa, Homo sapien
MGILFTRIWRLFNHQEHKVIIVGLDNAGKTTILYQFSMNEVVHTSPTIGSNVEEIVINNTRFLMWDIGGQESLRSSWNTYYTNTEFVIVVVDSTDRERISVTREELYKMLAHEDLRKAGLLIFANKQDVKECMTVAEISQFLKLTSIKDHQWHIQACCALTGEGLCQGLEWMMSRLKIR

SEQ ID NO: 1677 - DNA, 2069 bp, Homo sapien
aaaaaaagaatgccaggggggaattatcatgctaaattattttactgctgaagatagcttcattgcaaattattctttttccagaatttcccccaaacaacttagaattccataagtagaacaagatagattctacccccaaaatattcataagcaaatcccactgcccttaaaataaggaagttatgcctggttgtctgtgaatggaacctcagtaggtaatcctgatgaagcttaaaaccttagggcagtgtctacatgggaaacaagtatgtggaaattgacaatcatttttaccaaatcgttgagtaataatatgacttacctgatagatatacacattcaataaggaacatttttttttttcaataaggaacattttaactaaaacattactttagggctgagatttccaggctatctacattgatctactgaaaaatttctagatttccatatacaaacgaagaagacatgagtttagagaatttttttcctttaatttttttttaacagaagggtatcagagtggaggacctagattacgctacctgtgtttgaaaatattgcgctttgcctaaccttcggtggaatgtattgtttcagcatattctatgtataaaaaagtttaaagatgtcttcaaagaagactagagtctttaagtcacttatagctatattttactacaaaatttgtgtataaagatatatttaagtgttttagataaatttaagttactccatatgaaatgtttaatttcagctactgtgaattctttcgatcagtcctttgcttttttaaaaaatcttttccatcgtgttaaaaagaaaattagctattaggagatattaaaagattgatgtcttagaaggacagggttaaaaccttctgtaatatatttaaatatatatttttaagagagatgctacattgccaatgattttataaataatttaaaattaatttacaaatttatagatgcaaaccaaaagatctttttaaaagagagagagaggaaaaaaatcaccttttatttgtttgggtctcattgtcagaattattattcagatcaagaaatctgtgtcgataaaacctaatctcatattggagagtgaatgtcgttaagtatttctgaaatgtttctaaaaaatgaacatgaaaaaaataaggtattttctccctagcttctcattacagtatttctaattgcttcacactttacagttttaatacaaagtacaagctctacttttataacgtgtactacaagtttctttaaaagtattgttgtatttcagctgaactcttgtatctgcagtcttttgttatttctgcaggctacacccttaatttgcagaggccattttgttgtttgtttgatgctgaagctgttgttaaaatgccccaaactccaaggcagattgtctgtataatacgctatagcttttcaccatgtggtgtttaccagctgttactctgtattttaaaaagccagagatttcttctgtctaaactgtttctatagcattttctaaacaaaaaaaatggtttttttctttgccttgtaataagattgtaaatccatttcctgcttgtgttcttagtgggcatgattgtgagtgtgtgtggggtgctcacacgcgtgccagtctttttgtactgtaactacctcatggtttgaatgatgattgtactgctggttgtgttaacagagcacattttgttgggtgagtcctatgtgatttttttcatgtttgttttatctgggggttgttcatgaaactgacagatgtttttctaaaaaggactattatcagtttccaaatacaatacttctctcttctggtttttcctgaatgagcctgattttgttgctggttttcatcatctatgagggtaaaacgagtacccttaaaatccctgtggccagtttgaacacccctgttgtattcttttctctgttcagtgtgtcagctattttgtgaagatgcttagatgtatagttttgataaccacagttttaaatcttttatctgtgcataataaaaagatatatatcagttattaa

SEQ ID NO: 1678 - protein, 37 aa, Homo sapien
KKECQGGIIMLNYFTAEDSFIANYSFSRISPKQLRIP

SEQ ID NO: 1679 - DNA, 5403 bp, Homo sapien
  Unsure 1740-1856, 3617-3647: Unknown base
tgggtttacaggtgtgagccactgtgcagcctccttttatctaattgtccccacagcagacttgtctggtcttggctattttccggttgttaaggtgtttcaggatggaggaatcagttcctgagatagttattaagttctgcctgctagaaagggacagtaagtgggttgatatcattctagacttgttaagaaattgttcagaattttgattgtttttcatagcagcttgattaaaatacagattttaataatttccttactacttttatacgtagtgctttcaaataaaaccagtgattgctaaatccaaatgtctttctcccttgctaaattatagcaggagcatgctaaatatttcatcagactactggaatgatggttttacattttaatgtttgaaaacataattttggttcaattgcagtgtaaaactattctcagtaactttaaacttgaaaacttggcaccaaatttatttaggtagaaactctttaaaaatagtttcttcctattattaactgaagaatatatttaagaaagtcttcataattaaataagagtttggataccaaagggttaaaaatacacatgtatttcttttgctgaagatatcttagatgtttgctaatgttttatctttacaaatggacaatttagtaatgttttttatctttttttaatgattccatgtatttgcttatttccatctaggaatagttactaatgtatttgagatacagcataccaaattttaaagtaaccagaatcgtgagttgatggtttttagtccatactgttaaacttatgttgaaatattgacatatttaaattggcttcatgctaaaaaattaccaaaggtaatttaaaaggcagtgttttagagcagtagctcatggtcaaggtggtcacatgacaatggcttaagctcagtgtgcttctgcaccttatgttgtctatgtatttttaatccaaatgttgcctgcaaatatgtgatcccttattatttaagtttcctgtattatgaaccattgcccgttttaaatcacacagaagattctgaatctgtaaaaactacacatgtcaatgttttacagctacgtaattcgaattgacttgattttttcaagtaatcctagaaagggggagcattccatatagaaactgctgaaactgccacaggtgcttctccgaaaaccttacagttgtggcattgaatgttcagtatcgcttcctttctgcacacgaggcatactgttgaggtatttgttgcggtgattggttttaacgctaatctaggaattcagatagagatgctttagatttgcatgctttgcttacctaatttatgatatctacctttctatttgtaaactaacaatagctaagttgagatcagaattttaacagaaatattatttatataaaaattgttatcttttattgtcacatggcattaacaataagaaaacatcctgaaggtgatgtgacaactcggattctaaaaattatacttcaggtatttcctgatccgtggtttttcaaaattgaaacaaagtcgttctcatcagaatggcttctcctttgttctggaattgtggcactataagtggaaactggtgggaccctggctggcttcagagtggagcctaatttttaaagttctttaggggagaattcttagatataaattttagtgaaagttctttgggggagaattcttagatataaatttgagtnnnnnnnnnnnnnnnnnnnnnnnnnnnnnnnnnnnnnnnnnnnnnnnnnnnnnnnnnnnnnnnnnnnnnnnnnnnnnnnnnnnnnnnnnnnnnnnnnnnnnnnnnnnnnnnnnnnnnagaggtaataaattttaatattctattcagaataagaaaatatagcatataagcatttgtatctttagtaaagttactgccagtttgatttttttttttgcaagttacttagcagaacatgtaattcacagtaaagatgattctgtgttgtaccatattttaatattcctgttttgaaagaatagtagagagaaaatgggtggcctgctcagtgattgcttttcgtagtcttggtgaatgttacaggagattgaatttatagataaaagcacagtcatcatagtttccacagtacattgcagcacatttagcttgctagcctaaaaatctgatcatgctgagtttcttttaaagaaagttaattttagaacttcaaactagaaccagtttgaacctcaagttgaccgttgtctgagttttaaaaatctcttcccattttcaaagatttttcaaatggatgtaggagaggaccaaggaggtaggctatagctgtagaacaacacagtcctattttcagaaacgaacagacacacgttttaggtcaggcacagcccatgtatccaggtgcatcaaactggggatgctaagttcaaaagtgcgtctgttttgaagatttcatctgaaaataatgtgtacactttcattactaccagtttgcattcaaaatagtttttgagactctttaaactcttctggatactttaattttccctttggaatagtgtgtaaacacagtccggatgaactttactactgatacctcacttgaggttgacaggagtggccagcagttagtgcctatggtcatgtaatacactaagtcaatacctgtggagtgaaatccggtctctataaaaaatacaaaaaaaatggcgtgagccaccgtgcccagcatggtatttatgattctaagtgccatttcaaaaatctgtttgctcttttttattctctggtccactaaagagtaatctttactgtgggctttatttcatatttttatttgtcctaatactaagtggtagcttctcatttctctgtttcttgattttggagagcaagtctatgcttatctatagaaataatcagtttgtaaacttatgttctccttgaagagtttttgaattttcatgtggcaacttatttttctgttcacattcttgacagaatagaccctcccaggtcatctgcacttctgatatcttttgaaagtgaaatataccattaaaaaaaagtccagctatatgatgaagctgtcacgtaatattagtatattttctatttcaataacaaggtgatctgattttgtacaaagtataattaatgtaatacaatctgcccaaactttggtgcttccttttcatttaattcatatatcaaaataaaaatattatgcaatactagaaaatactcatggccattcatagccatgcagtcttaataaggctaataaaaatagtgactttagtctgtaatagtcctgcacatagccgccttatatttttaagaattttgttggtttctgagattctcaattctcttttatctctgatcagataggatttgggtcttttttcaaaaggtgtaatgcatttatcttatgctttaaaaagtagagacgcttagctagtgtccatgcacacttctcatttccaaggtcagagctctatgatgtctgcaaataacgaatacaaggctattgtcagtccttataaataagaaaatattatttgtccctaattctgtagttttcactctcaaatnnnnnnnnnnnnnnnnnnnnnnnnnnnnnnngcattaacagtaaccccaagaaaggcatcagggttctggagtggttgtttgagtgacacagcacaaggccttgatttcatcatgcttttgctgtggatgtagtgtagcttgctgaacaggtatggaagctgtctttgctgttaagtacttctcccgtttgtttatcaacctgcagctaacaggatgtctgcttttttacaggtttatttcacagagcagtgtacattcttgtcttccaggggaacttcaacatggagttacttttgatccctcagttttaattcagtgtctaaaggtttacaagttcaacttactctattttattcagctctttcacttactctgccatcacttcctacttgaatctgagttttagctactgtagaggtctcagacctttcctttttagtactattagccaggtaaaactttggttcttgtgagtggtagggatgagtttttaggacagtattcaaagcctttttaaaggaaccaactactcaaatgctctacaatgccaaaaatacaatactcctgcaggttttcccaagcaaggccaaaacaatcaaaatctgacagaaaaacacagctgttcagctctggaatctgatgataggctactttttaatgtcaggacatccttctaaacttccacttacagtgtcacatgtaagcatgaaggctggctcgttggtgagccattgctttgtttttaggaagacagttatgaatgccatggacaatctcagtacatgttgtttgttatgattttattcacgctaaaggaatgggtattaaaattaagtgcatataatatagaattcagtttcaagtctgaagttagcgtaaatttagattcttcagactaacataaaacatgattttgagaagttaaataggaagatgccttttttagaagtttagcatatttagtttatctcccaaatcttgcttagaaatcaaatgtatataagagaagttagttacagagctagattgattaactacttctttaatgaagatttgctatgaatttgtttactctttcataccaccttcagatagctagtcagttcagcaggagcagagaccaggttagcacgcggatggggtgtaattcagtgtttttgtgttgtacagcctgagaaatgccagtggcctgacagcagcagacattgcacaaacccagggtttccaagagtgtgcccagtttctcttgaacctccagaattgtcatctgaaccatttctataacaatggcatcttaaatgggggtcatcagaatgtatttcctaatcatattagtgtgggaacaaatcgaaagagatgcttggaagactcagaagactttggagtaaagaaagctagaactgaaggtgagaccgctttgcgggtgggaagagcacacttatttttcctttctgtaatatgttttctttttatggctgagcgcaccttcgagatgagaccttcacttcaggtggtaatgcgcctggtggattgtgcggtgacggtggagatttctcctgtactgccactgcgaagatgggacacttaacaaaagggaatgtgagggaaatactgatggcccaagtgtaaatgtctatgtggaactttttgagcacccatgtttacctgccgtgaattagattttttaatttgttgtatctgtttgaaatatatctattaaagaaaatctgccactgtgcctggaaaaaaaatctatgtcgggtgcggagaaagaggtaatgaaatg

SEQ ID NO: 1680 - protein, 40 aa, Homo sapien
  Unsure 1740-1856, 3617-3647: Unknown amino acid
GFTGVSHCAASFYLIVPTADLSGLGYFPVVKVFQDGGISS

SEQ ID NO: 1681 - DNA, 4657 bp, Homo sapien
  Unsure 2726-2752: Unknown base
ggtggccagtactactgggacaaattgtgttttttattattaataataatgataataatactatccctccaaggcacaagtgaactatatagaactgcgtgtgtgtaaactctttactctcgtctcattttgttgagtttagaacttgatgtgctcgtcagtcttgtgtttcaaaacactgaataacttccaaagcaaagttatgccagtgtgttcaaaagataaattaataatgtaccagcaaagagcatcattcaaagtatagtccttgcatattccagttaccatttctctaataattaaaatattcatgataaatatatatatagcatcatatgttaaaaactatttcaaattctacatattaaggatgaaaattttaaaatccagtaataagaggagagacctgcctatcagtacagtgatataggtaaaagatgaaatatgtttttaaaataccagcaattaactattgttttcatgtgttctcctctagaagcaaaccaaaaattccttcatggaaaacaattcttacttctacatgtgtagtttatatctgatgcattacaagagctaatgtttaaagacaaaacaaaacctgcctgtatgacagcagcaactcgagccaacatttagtgttacatgttatatttttgaaataccgttttgttatcatattccacatattactttccataaagtcagagaagttcaatgtaaattgttggctctgattcttccaccttgggatacacattcacaagaagatttatatattttcttactatgatagaggaacataatctgggaaaacttcccatgtctgtaagatgaaaaggatacctttaccatgttgtttttgataataaagaatatggaaaatggtagaaatctctcctctctatgtgtatttgtatatgtgtgtatacacacacacgttattgacatttttacataacatgtgattgccacttcttataaagttatgatatagaaccccatgaaaacaactttatattatagatcaaataatgtgcccagaaacgcaattgcaacagtaaatcttgatctattggtaagagtctatgatacaggtcttcattctatccctaaacataatgttagtaaagaggttccatcagattgtattatagagaccttcctattgctatttatttttaagagatgagaagactgactagcaatgtctccacagtgcaatggtttcacttctgggtctgtctgtctgttgtgtaggtgagatcagtgttgtcaggctctcagaataatttttaaaagaatccagaagcctgacttcacaccaagtagccatcctagatgggcgggggggatctccatgttcaaccaaaccctcagaacttagagcaataaatacattcagtcatttatttataaatgaatgacagaatattcaatccaaatagaaacaaccttttgtcagtgatgcaacataacatggagtcttatattgagaaagtgaatatgaatattttaaatagatgcctaggaaatctgtgtttgctgtttacatttaatgtactttgccacattagcagtaccacacttcttttactttcatccttctaagaactaatgaaagatagcttgctattagctttgacatgttgcacatgccattatgttgttctctaagaacaactaaattctctccagtgttcatgtgtgattcctttttcatcattattactttaatgtggatgaatactatttctaggaacttgattatcactgaacagattgcatatgtaaatgcagataattcttgagcaatatagtgaaaatgatttcacacacagtttgaaatctcatattaaacagtggtaaatttttaaacattaggacattagctggctgcttctataaatgtacctgtattgtctgcctgctccttttgtggagatgtgtttttgtattggatgtttgggccaatgggaggcttcaagctacaacatattttcccactttaaataatatttaacatatgacaaaccccagacaaggcttttaatatgtataaagaactgcagtgttaggtggtttatttgcaaactgttttcagtgttgtccatttttatggcacctttaacaatattcttgtttccaaagtacaaaaaaaataggttaaataatctagccataactgaatgtcaagcaataaaacaaatgacttttgtgcatagacttaaaaaatacaaattttagacatctgcatgtaaatgcaatctcttgtttactgctttcttcaacttgagcaatcgattccttatttactattaacttaagaacttgtaacggcctgtaaacattttctctcttactcttctttcaaatttacctgtccctgcttttgagtcataatatttaatgttgttctgcacatctctatacagttaactttttggctttcattctgtatagataagaaaatgttatattataaacagcctactcagtgcaaatatttatctgtttatcaaatccacaatatgctgtataataccggttttactatataatctattttagacatagctgtttagaactagagtgtgctatttttgtgtttttctgatgtgtggtgctagacaagttacttttgtgaacaacaaaaattatcccttttattcctagacaataccacctttgggtcttgttaatttcactgagtataactatatatttgnnnnnnnnnnnnnnnnnnnnnnnnnnnccctatgcccaactggcagctgtatcagagtgctggatttgggacatgcttttctctttaaatacataatatcattatataaattattctagagtgtatttaattaggataaaattacttccttagtatggatatttgacatctatagggtgaatttgtttataaatatggctatatggaaacttattagcatttactttatgtttgctacttggctttacagcatatctcctaagctgaaaaataatttgccaggccttcaagatcctaaagaaacttgtttaatggagtaatatacttttttttcttattaaggaattgtattactggcacctaacacagttgtattcttagctcctattatagataatgggcatttacataaaatatcctagatggcttgatggcagaataaacctttcccctcctacctgagtcatgagaaggatggagacgtcctctgccataacatgggccataaagcaaattcgacatgggatgttctgtttcagtatgacctcaaccagttccatgaactgagtgaaggaccttcattttcaaagttatttaataagtagcttaattaagcctttctacccattctcccaagatctattggcattattgaaaagcaaagtttatcaaatatctaactaaggatgtagttaaccttattaaatattgattagaattgttctgtaatattactgaatttgtaagatctttagcaaagatttttgagcaatttataaatgtagagcaaatgtttctgtttactgcactttttgtaactgaaggtgataaattctcaagccatgattattggcttccatgcactgcagtatttatccacaattctagacattttccatttttgtggaagagttgctgttaccttaattataaatgcaattgtgtggttaatgagagctaatactagtagttaaccttttaaagtggattggctacagttgagggagaaatctcttttaatataaatcacatcattccttaactgcctctcttggaaagagattgaaaccttttttttaaagcacgatttagcatcctaagcttcctgagggtagagattgtatctttttgcgtctgcacaatggctagcacatgtcagcatttgacaattgttaaatgataacaagtgtgccccaattaaaacgtttttcctgggttgttttgttaaatttacaaagtaagccaagccttacggttaacattctcctctacaaccaagtattaaagccacatttaaaaagaccacatgaaatgctgattctaattgtgtgtaggtcttgaggattaagcacacaaatttcacaaacttctgtttgagtaaacaaactcagccttctgtaaatatacatgcaagtttggaaacagtaatactgtacctataaatatatgctgtctgttttgtgtacagtatgtaaaaactccttttctgccacactaaaaatgcaagccatttatgggaatcctaaaactagtattgaactaaaactttgctaatgatctttattagaggatcgtccaacttttcacttaccttgggttttcttttcaattcactcttacactagtctgcttatttccagctgtttattttattgagtcctgaatttaaaaaaaaaatattttgattcattttgtaaatacaagctgtacaaaaaagagagatttaatgttgtcttttaaatactccaattttcattctaatatgaatgttgttatattgtacttagaaactgtacctttaatattacattacctttattaaaagtgcattgaacacatcaattttagatgtgctttatgtactgttatcctataataaaacttcagcttctaatggaaaaaacaaaaaaaaggggcgcgccgccgattatt

SEQ ID NO: 1682 - protein, 27 aa, Homo sapien
  Unsure 2726-2752: Unknown amino acid
MCFMYCYPIIKLQLLMEKTKKRGAPPI

SEQ ID NO: 1683 - DNA, 4303 bp, Homo sapien
ggagtccagtggctgaccgccttgctggagcggagatgcagccgccgccccgaaaagtgaagccggcccaggaggtgaagcttcgcttcctggaacagctgagcatccttcagacctggcagcagagggaggcggatctgctggaggacatcagatcctacagcaagcagagggcagccattgaacgggagtatgggcaggcactccagaaactggctggcccattcctgaagagggaagggcaccggagcggtgagatggacagcaggggcaggacagtgttcggtgcctggcgctgcctgctggatgccaccgtggctgggggccaaacccgactccaggcgtctgaccgataccgtgacctagcagggggtacagggcggagcgccaaggagcaggtgcttaggaagggaacagagaacctccagagggcgcaggctgaggtgctgcagtctgtccgggagctgagccgaagtcggaagctgtatgggcagcgggaacgtgtgtgggccttggcacaggagaaggcggctgatgtccaggccaggctaaaccgaagtgaccatgggatcttccactctcggaccagtctccagaaactgagcaccaagctgtccgcccagtcagcccagtactcccagcagctgcaagcagcccgcaatgagtacctgcttaacttggtggctaccaatgcccacctcgaccattactaccaggaggaactgccagctctgctcaaggccctggtcagtgagctgtcagagcacttgagggaccccctgacctccctgagccacactgagctggaagccgcagaggtcatcctggagcatgcccaccgcggggagcagacaacctcccaggtaagctgggagcaagacctgaagctgtttcttcaggagcctggtgtattttcccccaccccacctcagcagtttcagccagcagggactgatcaggtgtgtgtcctggagtggggagcagaaggcgtggctggcaagagtggcctggagaaagaggttcagcgcttgaccagccgagctgcccgtgactacaagatccagaaccatgggcatcgggtactgcaacgactggagcagaggcggcagcaggcttcagagcgggaggctccaagcatagaacagaggttacaggaagtgcgagagagcatccgccgggcacaggtgagccaggtgaagggggctgcccggctggccctgctgcagggggctggcttagatgtggagcgctggctgaagccagccatgacccaggcccaggatgaggtggagcaggagcggcggctcagtgaggctcggctgtcccagagggacctctctccaaccgctgaggatgctgagctttctgactttgaggaatgtgaggagacgggagagctctttgaggagcctgccccccaagccctggccacgagggccctcccctgccctgcacacgtggtatttcgctatcaggcagggcgtgaggatgagctgacaatcacggagggtgagtggctggaggtcatagaggagggagatgctgacgaatgggtcaaggctcggaaccagcacggcgaggtaggctttgtccctgagcgatatctcaacttcccggacctctccctcccagagagcagccaagacagtgacaatccctgcggggcagagcccacagcattcctggcacaggccctgtacagctacaccggacagagtgcagaggagctgagcttccctgagggggcactcatccgtctgctgccccgggcccaagatggagtagatgacggcttctggaggggagaatttgggggccgtgttggggtcttcccctccctgctggtggaagagctgcttggccccccagggccacctgaactctctgaccctgaacagatgctgccgtccccttctcctcccagcttctccccacctgcacctacctctgtgttggatgggccccctgcacctgtcctgcctggggacaaagccctggacttccctgggttcctggacatgatggcacctcgactcaggccgatgcgtccaccacctcccccgccggctaaagccccggatcctggccacccagatcccctcacctgaaggccagggaagccttgacccccagtgatgctgctgtccctatcttcaagctgtcagaccacaccatcaatgatccagagcaacacagccaaaagctggaatcgcccttatttccaccctcacctccaagggtggaaacttgccccttcccatttctagagctggaacccactcctttttttcccattgttctatcatctctaggaccggaactaccttctcttctgtcatgaccctatctagggtggtgaaatgcctgaaatctctggggctggaaaccatccatcaaggtctctagtagttctggcccacctctttccccaccctggctccatgacccaccccactctggatgccagggtcactggggttgggctggggagaggaacaggccttgggaatcaggagctggagccaggatgcgaagcagctgtaatggtctgagcggatttattgacaatgaataaagggcacgaaggccaggccagggcctgggcctcttgtgctaagagggcagggggcctacggtgctattgctttaggggcccaccacgggcaggggcctgctcccagctgccacgctctatcatatggagcgaggtgttggggaaggcggggcaggcagcctgttgcaggcaggggaaggagaagagactgaggggctgtgacctctcctgaggcccccagcctgagactgtgcaactccaggtggaagtagagctggtccctcagctggggggcagtgctgtccagtggaggggagggctttcacgcccacccaccccctggccctgccagctggtagtccatcagcacaatgaaggagacttggagaagaggaagaataacactgttgcttcctgttcaagctgtgtccagcttttcccctggggctccaggaccttccctacctccaccaccaaaccaagggatttatagcaaaggctaagcctgcagtttactcggggggttcagggagccgaaaggcttaaatagtttaagtaggtgatgggaagatgagattacctcatttagggctcaggcagactcacctcacatactccctgctccctgtggtagagacacctgagagaaaggggaggggtcaacaatgagagaccaggagtaggtcctatcagtgccccccagagtagagagcaataagagcccagcccagtgcagtcccggctgtgttttcctacctggtgatcagaagtgtctggtttgcttggctgcccatttgcctcttgagtgggcagccctgggcttgggcccctccctccggccctcagtgttggctctgcagaagctctggggttcccttcaagtgcacgaggggttaggctgctgtccctgagtcctccattctgtactggggggctggctaggacctggggctgtggcctctcagggggcagcctctccatggcaggcatccctgccttgggctgccctcccccagacccctgaccaccccctgggtcctgtcccccaccagagccccagctcctgtctgtgggggagccatcacggtgttcgtgcagtccatagcgcttctcaatgtgtgtcacccggaacctgggaggggagggaacactggggtttaggaccacaactcagaggctgcttggccctcccctctgaccagggacatcctgagtttggtggctacttccctctggcctaaggtaggggaggccttctcagattgtggggcacattgtgtagcctgacttctgccggagctcccagtccaggaggaaagagccaaggcccacttttgggatcaggtgcctgatcactgggccccctacctcagccccgctttccctggagcacctgccccacctgcccacagagaacacagtggtctcccctgtccgggggcggctttttccttccttggagcgtccctgacggacaagtggaggcctcttgctgcggctgcaatggaggcaaggtgctgcagagcccaggtgcactgtgtgatgatgggagggggctccgtcctgcaggctggaggtggcatccacactggacagcagggaggaggggagtgagggtaacatttccatttcccttcatgttttgtttcttacgttctttcagcatgctccttaaaaccccagaagccccaatttccccaagccccattttttcttgtctttatctaataaactcaatattaagatgtt

SEQ ID NO: 1684 - DNA, 1720 bp, Homo sapien
gagaagaccagggaagaagcagaacttgaggccaacagtgtgtttcgtcaaaaggtagaaatgtcctaccagcggatggagaatcctggctgccatgtggttgatgccagcccctccagagaaaaggtcctgcagacggtattaagcctaatccagaatagttttagtgaaccgtagttactctggccaggtgccacgtctaactagattagatgttgtttgaaacatctacatccaccatttgttatgcagtgttcccaaatttctgttctacaagcatgttgtgtggcagaaaactggagaccaggcatcttaattttacttcagccatcgtaccctcttctgactgatggacccgtcatcacaaaggtccctctcatcatgttccagtgagaggccagcgattgctttcttcctggcatagtaaacattttcttggaacatatgtttcacttaatcactaccaaatatctggaagacctgtcttactcagacagcaccaggtgtacagaagcagcagacaagatcttccagatcagcagggagaccccggagcctctgcttctcctacactggcatgctgatgagatcgtgacatgcccacattggcttcttccacatctggttgcactcgtcatgatgggctcgctgcatctccctcagtcccaaattctagagccaagtgttcctgcagaggctgtctatgtgtcctggctgcccaaggacactcctgcagagccatttttgggtaaggaacacttacaaagaaggcattgatcttgtgtctgaggctcagagcccttttgataggcttctgagtcatatataaagacattcaagccaagatgctccaactgcaaatataccaaccttctctgaattatattttgcttatttatatttcttttctttttttctaaagtatggctctgaatagaatgcacattttccattgaactggatgcatttcatttagccaatccagtaatttatttatattaatctatacataatatgtttcctcagcataggagctatgattcattaattaaaagtggagtcaaaacgctaaatgcaatgtttgttgtgtattttcattacacaaacttaatttgtcttgttaaataagtacagtggatcttggagtgggatttcttggtaaattatcttgcacttgaatgtctcatgattacatatgaaatcgctttgacatatctttagacagaaaaaagtagctgagtgagggggaaattatagagctgtgtgactttagggagtaggttgaaccaggtgattacctaaaattccttccagttcaaaggcagataaatctgtaaattattttatcctatctaccatttcttaagaagacattactccaaaataattaaatttaaggctttatcaggtctgcatatagaatcttaaattctaataaagtttcatgttaatgtcataggatttttaaaagagctataggtaatttctgtataatatgtgtatattaaaatgtaattgatttcagttgaaagtattttaaagctgataaatagcattagggttctttgcaatgtggtatctagctgtattattggttttatttactttaaacattttgaaaagcttatactggcagcctagaaaaacaaacaattaatgtatctttatgtccctggcacatgaataaactttgctgtggtttactaaaaaaaaaaaaaaa

SEQ ID NO: 1685 - DNA, 3226 bp, Homo sapien
ggcaggaatttcggtagaactggagtgacctgtggaactgctttagaatctaacctgctgtcttcgtgctctgtgtgaaggggaagctggggggttagcatgaagtctggccttgtgtgcattggagcttccaaggcactttgaaatcattccagtatatttgggaagaattgagtgaatgagaatgctcttccttattctggtagatttgacttgtttataattctgcactttagaagaaaaacagtgttaatctgtagttgaaagaaagcttagtagatgagagagttctaggctactgtggctttttccagtagatttagatgagattatgtgttttgaaatgttttgtgggatcccttagaaagcatcacttcagggcagagacactcaatattgccagccagcttgggttctaaagtgatttaatcaaattcatgctcctgatcttttttttcccccttcctttggctatgaaaacccaaagcccggagtgattgttttctccttgctttaagcagtgaagttatcctaatgcaaaagagcttagtagaaaatgagtggtttacctttttttctaaaagtatattttcaagtttattctggaatgtgatgtcttggtcctcttaaaagcagatcagccatgactgaaactcaaggcttagctggtatctatgttgtgctacattaggtgactagaagccacttcttagtgtaatcagctcctgtttccctgtgagccttagttatattttaattcagtggctttgagtcaaggccggttctaattgaggggacccagtgtgcttcagtgttaagagtggggcaatgaagagtgaaccccaatgaagagtgatcccaactttggaaactatctggtcattcatgaccttaaaaagctgccatggtggtcaaatggcatgtgtttgcacaaaaatgaccgatgtgtttaaccaaagctttgaaatgtgatgaagccaccaacataagcacttgcctaacagaaatcagtatttcttctacttagaaggcttggggcccagggtaatgaggcaccagatgaagataagatctgcatcaaggaattaaatttccagtttgtccttggggttctttctgcttatgttttttcccccccatctggtaatagtcctcttctgagaatgaaaggaggcacagaagttgcgagaaagacccagtccccagtctttgccaccattgcaccatggttgtctcggagtcccttcacctgacctttttagtcagctcagatctttttgtagtttgagaatagacctattcaagagctatcagggttaaaagctgcactgaccaaagctgtacttttaaaacacaacccctgggctagtgatgtctctacttgctctatgagccttttgccagcctcagaataggcgaggtaaccttgaatttcagggccctggaaactctagctgaaacctgcctttcctaatgctcacacaagcaccaggtaccctgagcttatactgagtccagtggttcctatttatgtgtgtgtgtatgtgtgtgtgttgagtaacatgaaacttggcagtagcagagagcactgaagttcacatgcaagttctaatctaaagttaagcagtctcttatttgtttcgggactctgatttgactctttttctgatgctttcggcatgtctgcagcctgttctcctagcctgctgcttggagtcaggttgagcatcagtgagatgaagacagtaccttttcctctcacattggcagaatagcacgcactagatgcctgaccttgagctctagtctcccctttaaatcttaccttggcagtaacacattattcctcattcaataatttcaatgctgaaactgaactctattactaatgccttccaatcagagttcctgatggggatgcctgtgggatggcccacacctgggggacctggcagatggggtgagttgggtaaggaagatgatgcttagttcctgatagatgctacagatgtagtttggcatttcagtttttgtccagtttgattttcactggggtttgagtcacagcaagctgtgtatgaacttgtgttttgtggtgacacattaataatcaaattgctaaaaccctgaatctgcttattcttcagcttcacctctgcactaaccccttacccttatggtacgtcaggattttaactagtactgctttgttgactttgggaaatggtgccactcaaaagcaacttcctaacttgaggaataactcctttgtagtttactttctggtactggttggtgccttgtattgggatacagctatattcttagctcaaatgtcctctttttgagagcaaagtagttatccaatggtgagacgagaccctgacgctcatagaggccattccttcctgggtgtcggaccagggctctgtgtcagggaaaaccttctgggtggactttgtaagaatccagtttccaaggttagattcacatccttaatcttgcagagactagaatttcacagctcgctttggaacatattccaattcaaccagttaaaatcagaggaccaagtcgtgggggaggggggcggtgttgaggagaggtatttttaaagatctggcaacttttcaggattatttgtggagaactctaaggttaagatcaggaaataaaagactgtgtgtgtgggtgtgtgcgtgtgtgtgttcaagtgcctaaatcttgtttacctatcactttaaaaaaataattgaagtgtaagctaaataaaatgcttggagttttgcctgggctagtgagagttggtgcaaattcttgtgtgtgtttgcataggaaggtgagatgaccatctactaaagaggaagtagctaaatacagatctgtgggtgtttttaaaaaaactcaacctatctggtgttttattttaatggataaaaatgtaatttttctaaggtagcaacttatttccaaattaatatagatgaaaaatagataccaattagactaaattgaaagctttttgttctatatttgcatagcctttgaaatatttcttagtgcctaggaggtctggggattcctctttcgtggtggtcactaaccttacttgatgcagataaaatcacttgtcaatgcaaaatgtgttagaacttgataaagctttgagtttgagaaataaaggtatatttaaaatttaaataaaacttgtcatttatgctcattg

SEQ ID NO: 1686 - protein, 25 aa, Homo sapien
GRNFGRTGVTCGTALESNLLSSCSV

SEQ ID NO: 1687 - DNA, 5288 bp, Homo sapien
  Unsure 3930-4007: Unknown base
tcgcctggcggagcggacaccggggcgtggtgggggagatgggccttataggtggcgtccgttggtgagaaacaccttgcgcaggtaaaagggtggcggcgagagggagttcccacccgtggctttcttagagaaatgaagtcttaagtcttaaatagacaacaaggaggggccgatcggtgtcttttggacgcgtctggagcccctccctccgccaaaggaaaagccccttggatgagaggcaggcgcttcagagaagctaagaaaagcacctctccgcgcgccccacctcctccgcctcgcgctcctcctgagcagcgggcccagactgcgctccggccgcggccctcgccccgcggagccctcctaccccggcccgacgctcggcccgcgacctgccccgagccctctccatggaggcagcccgcccctccggctcctggaacggagccctctgccggctgctcctgctgaccctcgcgatcttaatatttgccagtgatgcctgcaaaaatgtgacattgcatgttccctccaaactagatgccgagaaacttgttggtagagttaacctgaaagagtgctttacagctgcaaatctaattcattcaagtgatcctgacttccaaattttggaggatggttcagtctatacaacaaatactattctattgtcctcggagaagagaagttttaccatattactttccaacactgagaaccaagaaaagaagaaaatatttgtctttttggagcatcaaacaaaggtcctaaagaaaagacatactaaagaaaaagttctaaggcgcgccaagagaagatgggctccaattccttgttcgatgctagaaaactccttgggtccttttccacttttccttcaacaggttcaatctgacacggcccaaaactataccatatactattccataagaggtcctggagttgaccaagaacctcggaatttattttatgtggagagagacactggaaacttgtattgtactcgtcctgtagatcgtgagcagtatgaatcttttgagataattgcctttgcaacaactccagatgggtatactccagaacttccactgcccctaataatcaaaatagaggatgaaaatgataactacccaatttttacagaagaaacttatacttttacaatttttgaaaattgcagagtgggcactactgtgggacaagtgtgtgctactgacaaagatgagcctgacacgatgcacacacgcctgaagtactccatcattgggcaggtgccaccatcacccaccctattttctatgcatccaactacaggcgtgatcaccacaacatcatctcagctagacagagagttaattgacaagtaccagttgaaaataaaagtacaagacatggatggtcagtattttggtctacagacaacttcaacttgtatcattaacattgatgatgtaaatgaccacttgccaacatttactcgtacttcttatgtgacatcagtggaagaaaatacagttgatgtggaaatcttacgagttactgttgaggataaggacttagtgaatactgctaactggagagctaattataccattttaaagggcaatgaaaatggcaattttaaaattgtaacagatgccaaaaccaatgaaggagttctttgtgtagttaagcctttgaattatgaagaaaagcaacagatgatcttgcaaattggtgtagttaatgaagctccattttccagagaggctagtccaagatcagccatgagcacagcaacagttactgttaatgtagaagatcaggatgagggccctgagtgtaaccctccaatacagactgttcgcatgaaagaaaatgcagaagtgggaacaacaagcaatggatataaagcatatgacccagaaacaagaagtagcagtggcataaggtataagaaattaactgatccaacagggtgggtcaccattgatgaaaatacaggatcaatcaaagttttcagaagcctggatagagaggcagagaccatcaaaaatggcatatataatattacagtccttgcatcagaccaaggagggagaacatgtacggggacactgggcattatacttcaagacgtgaatgataacagcccattcatacctaaaaagacagtgatcatctgcaaacccaccatgtcatctgcggagattgttgcggttgatcctgatgagcctatccatggcccaccctttgactttagtctggagagttctacttcagaagtacagagaatgtggagactgaaagcaattaatgatacagcagcacgtctttcctatcagaatgatcctccatttggctcatatgtagtacctataacagtgagagatagacttggcatgtctagtgtcacttcattggatgttacactgtgtgactgcattaccgaaaatgactgcacacatcgtgtagatccaaggattggcggtggaggagtacaacttggaaagtgggccatccttgcaatattgttgggcatagcattgctcttttgcatcctgtttacgctggtctgtggggcttctgggacgtctaaacaaccaaaagtaattcctgatgatttagcccagcagaacctaattgtatcaaacacagaagctcctggagatgacaaagtgtattctgcgaatggcttcacaacccaaactgtgggcgcttctgctcagggagtttgtggcaccgtgggatcaggaatcaaaaacggaggtcaggagaccatcgaaatggtgaaaggaggacaccagacctcggaatcctgccggggggctggccaccatcacaccctggactcctgcaggggaggacacacggaggtggacaactgcagatacacttactcggagtggcacagttttactcagccccgtcttggtgaagaatccattagaggacacactctgattaaaaattaaacaatgaaaggtaaatcaaagcaattacttttatgttagtaaattttggtgtttaaaataataataataaaaacgttgtgtttttccccttggcagaaagtgtatctgtgtaatcaagatgaaaatcacaagcatgcccaagactatgtcctgacatataactatgaaggaagaggatcggtggctgggtctgtaggttgttgcagtgaacgacaagaagaagatgggcttgaatttttggataatttggagcccaaatttaggacactagcagaagcatgcatgaagagatgagtgtgttctaataagtctctgaaagccagtggctttatgacttttaaaaaaaattacaaaccaagaattttttaaagcagaagatgctatttgtgggggtttttctctcattatttggatggaatctctttggtcaaatgcacatttacagagagacactataaacaagtacacaaatttttcaatttttacatatttttaaattacttatcttctatccaaggaggtctacagagaaattaaagtctgccttatttgttacatttgggtataatgacaacagccaatttatagtgcaataaaatgtaattaattcaagtccttattatagactatttgaagcacaacctaatggaaaattgtagagaccttgctttaacattatctccagttaattaagtgttcatgtggtgcttggaaactgttgttttcctgaacatctaaagtgtgtagactgcattcttgctattattttattcttgtaatgtgaccttttcactgtgcaaagggagatttctagccaggcattgactattacaatttcattttggtggagtttagttttaggttttattgtatataaaatcctgcactgaatctgtgtctcctctgttacctacttttgccagtgaaatttaagttttaaaatactttcagaatgtatttttactactgcaannnnnnnnnnnnnnnnnnnnnnnnnnnnnnnnnnnnnnnnnnnnnnnnnnnnnnnnnnnnnnnnnnnnnnnnnnnnnnttttaatttccatatgggctaaagaatccaaatattttaaaaatctgtctctcttttcttctctcataaagtgaattattccttttttttgttttatgtaagtgtatatattcttagtttttcttgaaatcattgtaatgttaactttgttgtttcaaatatcttggtgattgcttcattatctcttcaacaaaaaaaacctttaattttgccattgaaactgtagaactatgccatgcttttattagaagcagtgctctgtgttaacaacaagaatggtgtaattagaattgggatgtggatatttactgtatgacaacacatttacagttctgtaatgcaaggatgcagtttaaaaatgtgaagtagtgatggtttttgaaataagctttaaaatatagggatcttgaaggctccctggggtaactattttataacttagataaaatggctagtcatatctgtgtgtttgtaaagttatttttttaatattttaagattacaattttaacaaatgtagaaatgagccaaactatttaaattttaaaacagtaaaacaaaatgaaacttaatagctcacaaaattccagtccatgtttcatgacttattttagtcaatgaattttctatttatactaaacatatggacattttaaatgtgtttctaatatttttgattatctataatgtgcctgtcttcaattcacaagattgggttataacaattatttgccagattaacactagggaattatttgataaccagcttatcttatcagtagttttattgctgatcaggcaaaaatagttttccaaagttatttttaataaagtatatacaaaattcttatatattactagtcatgataaagtaaattaagcagtttttaaaacttagtgtgagtttgttcatcacaggtctgatatgagtttaagggatttcgcactccctgaatcagagaagtaagaccccttccttagattcctgttatacattttttaaaatgtagagtttgttttggagacattttcagtgcattgttattgccatatttatataatatgactattctaaaggctgtgaggccatggggtattggttaagttgcttgcttttgctttgtccattttcatcattttaaaatgggggataataacagaacttgtttcctagggccattgtaagtcacttgaataaaaaatagttttgaagcatgagagtcatacagagcggtccacctaaaaggcactcctgataataataaatgattttaaacaagt

SEQ ID NO: 1688 - protein, 847 aa, Homo sapien
  Unsure 3930-4007: Unknown amino acid
MEAARPSGSWNGALCRLLLLTLAILIFASDACKNVTLHVPSKLDAEKLVGRVNLKECFTAANLIHSSDPDFQILEDGSVYTTNTILLSSEKRSFTILLSNTENQEKKKIFVFLEHQTKVLKKRHTKEKVLRRAKRRWAPIPCSMLENSLGPFPLFLQQVQSDTAQNYTIYYSIRGPGVDQEPRNLFYVERDTGNLYCTRPVDREQYESFEIIAFATTPDGYTPELPLPLIIKIEDENDNYPIFTEETYTFTIFENCRVGTTVGQVCATDKDEPDTMHTRLKYSIIGQVPPSPTLFSMHPTTGVITTTSSQLDRELIDKYQLKIKVQDMDGQYFGLQTTSTCIINIDDVNDHLPTFTRTSYVTSVEENTVDVEILRVTVEDKDLVNTANWRANYTILKGNENGNFKIVTDAKTNEGVLCVVKPLNYEEKQQMILQIGVVNEAPFSREASPRSAMSTATVTVNVEDQDEGPECNPPIQTVRMKENAEVGTTSNGYKAYDPETRSSSGIRYKKLTDPTGWVTIDENTGSIKVFRSLDREAETIKNGIYNITVLASDQGGRTCTGTLGIILQDVNDNSPFIPKKTVIICKPTMSSAEIVAVDPDEPIHGPPFDFSLESSTSEVQRMWRLKAINDTAARLSYQNDPPFGSYVVPITVRDRLGMSSVTSLDVTLCDCITENDCTHRVDPRIGGGGVQLGKWAILAILLGIALLFCILFTLVCGASGTSKQPKVIPDDLAQQNLIVSNTEAPGDDKVYSANGFTTQTVGASAQGVCGTVGSGIKNGGQETIEMVKGGHQTSESCRGAGHHHTLDSCRGGHTEVDNCRYTYSEWHSFTQPRLGEESIRGHTLIKN

SEQ ID NO: 1689 - DNA, 3700 bp, Homo sapien
ctgggtctccagcacaccctggagaaaagcaggtcagggggtggtgcttctgtttccagatgagcaaactagggctgagggagagggcgttctctggtcagggtggtagagccagtctcgtggaagccggctgagccactgaaacagaatcagttttctcatggaccaaacggggatagtgtctggcctgcgccaccccaagtgtattgtgaagatgaaatgagaaggggttttttgttgtggttgctggaaggagatcctagaagggaggaatgggggagaagatggcaaagggatcctaggacgaggcgtatgggcaagggaagcttgtctttctgggaggaaaatctcgaaccaagaatttcaggaagaaggcactgggaaaagagggaggaggtgccctcagatccatggaggtgagtgtcagcccccagatctcttgtgtggccaccactttcacggcaaccactcctcactgggaatccttggagtctggtgctttcaccaccctgccccggctgcttcatgtgtgccacctcgccctgtttccagactgatgcagagaaagttctcagagcccaacacttacatcgatggcctgcctagccaggaccgccaggaggagctgtatgacgacgtggacctgtcagagctcacagctgcggtggagcctaccgaggaagccacccctgttgcagatgacccaaatgagagagaatctgaccgagtgtacctggacctcacacctgtcaagtcctttctgcatggccccagcagtgcacaggcccaggcctcctccccgacgttgtcctgcctggacaatgcaactgaggccctcccggcagactcaggcccaggtcccaccccagatgagccctgcataaagtgtccagagaacctgggagaacagcagctggagagtttggagccagaggatccttccctgagaatcaccaccgtcaaaatccagacggaacagcagagaatctccttcccaccgagctgcccggatgccgtggtggccaccccacctggtgccagcccacctgtgaaggacaggttgcgcgtgaccagtgcagagatcaagcttggcaagaatcggacagaagctgaggtgaagcggtacacagaggagaaggagaggcttgaaaagaagaaggaagaaatccgggggcacctggctcagctccggaaagagaaacgggagctaaaggaaaccctactgaaatgcacagacaaggaagtcctggcgagcctggagcagaagctgaaggaaattgacgaggagtgccggggcgaggagagcaggcgcgtggacctggagctcagcatcatggaggtgaaggacaacctgaagaaggctgaggcagggcctgtgacgttaggcaccaccgtggacaccacccacctggagaatgtgagcccccgccccaaagctgtcacacctgcctctgccccagactgtaccccagtcaactctgcaaccacactcaagaacaggcctctctcggtcgtggtcacaggcaaaggcactgtactccagaaagccaaggtaagcagtcactcccagcctcccttggggccagcagaaatgtcactaaggtaggggaccatcttctgacccaggtggtgctttgtggcttttggcaccagctctgagcaagggctcggcactcaccaaggagtggccatggctttgccatgccttcagctcagtctctggcactgaccaaccagaaaggtgtctgcacttggttcgagcatccttccctgtgagcttggggatgcttcagttcttgccctccacacagctatgggtagattccaggaggccagctgcagctcagggacagattatgactgagttttcaaaccaaaaagtcagtcagtgactccacaggacttctaccattaaaactaaagaaacagactcacataggtggtttgaattgcccaaagttgcccacccaactactggcaaaattctcagcaagttgtgaatgaggaatccatgctatgatgcggtttctccctgatggctagtcaaaaaagtatcattaatcatttactcatttactcatttgtacactaaagaacatgcctagggctgcctttgcttttggcaaattctgctccttattcctatcctccttacctgctggagatatttggaggtcccacaacaatggctaaccaataaatccatgcaagcatctgaacctccactcccttgttgctgtgagagacatcacttataggcactcgctgttgtgccacagtctcaaaatctctgaataggcactctaagcagtgatgaacacacagggtttgaaacatttatcacctctgtgcctaaaatagtttttctcacattttttctatgtatatcaaggttgctacagtggataactaactatctttttggtggggggtgggtgctggtatttgaatggtaccctaggaatgggagaagaaaggagcaagttagaaaacaagcttcatctaaagactctcatgtcaatgtggaccttggtgacaatcctgctttgttaaagcaaaaactatgcgaaagggtgagtctgtttagaagaaaaagcaaagactgaggtactgtgaatggagagcttcagctaagaggaggctctgtcccttttcagagccaaaggaaataatacaacaaaaaggaggcttctttggagacctaagtctattggatgtaaacaagacgttgtatttagggatgttctgtgtttctttcttttttgaagttgtcatcaattgctttactaagatttttaaatagtgaaaacctcctgtttagactttggtggaagatgaatcaaggaagcagggccctgtcttatgggtcacgtgtctttggtgagtgagaagacctaaactcctggccatcatctcttatccaatacttagcagttggggattaaaccatccttgccttcagttctctccaatattaccaggcccaactcagtcttcagtgattttaaacagcattgacatcatctgtaaaaccatcatctgtaaaaccatctatgacatgagttttgagaaacaataatggggaaaatatttgggaccaagctgaagcactaatcccactaagttaaagacttctttccagtccaaggcaggcctgaatcaactgtctttaaataaaattttaagtgatgctgtattatatataggaaaaaatgcttaaaatcctgtcatttagaacagtgaaaagtatcttttgagattaaagtgactctttactgtaggaaaaatattactctgtgtttacagattcattgctgtggtcaggccatttttaagggaagagttatttaatataaatagtctctgattttaagttctgtttaatgttcattctccttccaagaacaaagtggtgatttttggttagggtgatcgccctcttaaaattggcagtgctgttccttgtgctgcccctgtcttttcctctgatggcatttttttttttttttaacacaggttgaaacatttcatctattatctctgcctcatttctggagggttgtgtatcagttctctaacacttgttcctgagaactaaatgtcttttttattcttatttcctctctcataaacatttggtgaccttttaccaagtggtgagttagttaggttttttaaaataaaatgttcattgtatttg

SEQ ID NO: 1690 - DNA, 1313 bp, Homo sapien
gcccggcccagaatactttttaaaagaagagcaggttagaggaaagaaaaaaattgatgctgaatgtggtgatgaaagcatgtttctaaaatgggaagcagatgcttaaagaggaaagactaatctgggattttgccccatttctctggtttttcactcctatatttaattctcacaatcgtgtcgtcacatagtgcaaaaaacaaaattcttgtaaagtccccaggagtttatgcttgggtgaaagttttagcctgagtattttcttcctctaaaaaaggtgggaaatgagacattgaggaattaacatataaatgtctgctatgggtttaagagaactggcgtatttggaatgcttcttacactaacactgtctcattgtaaaatataaaaccccttactctaactacatttttattcctctggtagtgtggtatccaggcaacatatcacttctgctatgtaattctaagaattctcatttctagagtacctgagccaaacaaatacacaacggaagctgcagctgtatcatcactagcaatttgctcatcattatttactacctttgaacctaaggtttcctgcctatgcttttgaaagcaaaaatcagtctcctttgcatgaaaaagagccttagatttttaaacatgttagttaccagaatgctaaaataccagttgattacccaaattattttggaaatctatccataatggaagtctacaacaaacacataaaacagattacactaagagctgagaaattcaaaggaactgaagattctgagagataaactgttcaagtcttagcaatgatactgcacttctctttgacaggttctgggcttaagttagaggccctactggttccaaaccatattccactgactttgcaagtaaaataaatttgattctgaaataggaaacaaaaaaaggagaaataaccgaatagtagaagaaaaactgtttgtaggaagacgatgcagatggaatgatgtggacattgagtaaccatgtcaataaaatatataaaccaaacttaaatttgtgaaataaggaagttggtacctttgttgttacagtgtataaaaacaatttcggaactgctgttgcaaaaagacatatatagttttgcttccttctggtgttaagctgtttatatttcagtttcagttttaacttctaagttgccttgtaattgggactgtgtttcagcatcacaaaaaccaaatatttattatggatgcatctgtatcagcaattaaaaaataaacaagtaaaagtgatactgtaggagaagctgaggctcaa

SEQ ID NO: 1691 - protein, 35 aa, Homo sapien
PGPEYFLKEEQVRGKKKIDAECGDESMFLKWEADA

SEQ ID NO: 1692 - DNA, 475 bp, Homo sapien
aagaccctgtctctaaaaatatatataaaaagtaaaactaaagaacttcttgcctaaacctgaattaccgcaatttgctgagtgactttgagaaaaatcagactgtttagttcagtcgggatgaaaagcttgcgattgcttcccacaagaatgggcaatagtgacggctgcaaggtacttttatttgttcatgaaagaacgacaatttttcaaaatgtaattaaacataatagaatgttttaaactactgggcactgaaactggaagaaaaaggaggctttattgaacattcccctttttcagttggttcaaagttcagcactgtggttatcattggtgatgccagaaaacattagtagacttagacaattgctatggcagtttctaaacagagctttttctatacactatttgcaactggagtgcaatattgtatattctgtgttaaagaaataaagtatttttatcatttatt

SEQ ID NO: 1693 - protein, 33 aa, Homo sapien
MAVSKQSFFYTLFATGVQYCIFCVKEIKYFYHL

SEQ ID NO: 1694 - DNA, 4519 bp, Homo sapien
ggcaggccgagccagccgtgcgccgcgctccagggcccagggcgccgcacacgcacccacccacccacccagcatcgcagcgccatgggcaagaacaagcagccacgcggccagcagaggcaggggggcccgccggccgcggacgccgctgggcccgacgacatggagccgaagaagggcacgggggcccccaaggagtgcggggaggaggagccccggacctgctgcggctgccggttcccgctgctgctcgccctgctgcagctggccctgggcatcgccgtgaccgtggtgggcttcctcatggcgagcatcagctcctccctgctagtcagggacactccattttgggctgggatcattgtctgcttagtggcctatcttggcttgtttatgctttgtgtctcatatcaggttgacgaacggacatgtattcaattttctatgaaactgttatactttctgctgagtgccctgggcctgacggtctgtgtgctggccgtggcctttgccgcccaccactattcgcagctcacacagtttacctgtgagaccacactcgactcttgccagtgcaaactgccctcctcggagccgctcagcaggacctttgtttaccgggatgtgacggactgtaccagcgtcactggcactttcaaactgttcttactcatccagatgattcttaatttggtctgcggccttgtgtgcttgttggcctgctttgtgatgtggaaacataggtaccaggtcttctatgtgggtgtcaggatatgctccctcacggcttccgaaggcccccagcaaaagatctaacattcttgctcaaagttgcgagagaaagtagcacatggagtagctgaggttaaacaaacaaaaaaaaattttaaacaaagaaaggaaaaaaattgacaataaaagtcactcttctaattgaatatttttatatttttatgaaacaaaagagcatttcttcaggtttctattgtattttttttaacattcttgcagagaaagcaagatccaaattgattttgggatattaaaagttaacagaacactgaacaaggaaagaatggcatagatctatctttacagtctggagttaattcctgttaactcattttatccattccttacataatcttctttcctgttagtccagtttgatggtgtgaatggtgaatttcaggcccagttgctaaattttgtggcatcttcctctagtccttcccacctccagtcatcagccccactctgtcttggagacaggcaggaggtgggggaagagctgaatctctttattttccctggtagagacatcttcaaggcatgaaatagcttaaagagcagagtagaaatggaagaggctttgcaaaaggctagataactaacaacacctgggttggggcggcggcctcttctcttcagctcccttagcttggctccgtaagtggatcacttgccaaatgctttagatgattgcctctcaataattgaaaggtggtggtagttgtattctaaatgatgtagaaggtttaaaaataattacattatgcttctattctatcatctaaaacaaatcattaaaactaatttctagctaattgttaattataattatgctcagaagtctatttaatgagctctgactgtacttacgctgcactgtcggtgttaagagaaattactctcacaagagcagaggcctgaagattctttcttctgaaagccaagcaccacaaggaaaaaaaaattattaatagctcaggttaaaaacacccatttaaacaaaaacaagagcatttgtaataggaagtgtttatacaaacagcacatttgtgatatgttgaaaagcatctctcttggcaaccaatctatgtttgaggaagattgggtaatgctgatgtgttccattcatgaaactgtatttgatacataatcctattattaattcgtatgcttagtcaacctaggaaatcaaaataatgttttgaagttcttatttgagcaatatggccttgacttggagggtagttttagttgttttgtttttaagtgactgtggtttaaagcacaaatgccccaaggtggggagacttctctctgtgattattgttgctattaaattctgaactgtatccatattttaaggaaggagctaaaaatggaaattcatgaaacataaatggtatcaagaactttatcagtatgctttgttgaaagcagaaattaagataataattgagttcaattcgcctctccgcattgcctattgatacactttactaatcatgaaattctaacctaaaaggaaaacattttcctgcttgtcttagaagaaagtggaataattccactgattgtgataatggtttcaatttctacacaatataaatatccagtataaaggaaagcgttaagtcggtaagctagaggattgtaaatatcttttatgtcctctagataaaacacccgattaacagatgttaaaccttttaatgttttgatttgctttaaaaatggccttcctacacattagctccagctaaaaagacacattggagagcttagaggataagtctctggagcagaatttatcacacacaaaagttacaccaacagaataccaagcagaatgatgaggacctgtaaaataccttgtgccctattaaaaaaaaaaaaaaaaaaaaaagccagtaactgaatccattttgatttttggttgagtttcctacacaaagaagaaaataactgagaatctggaatgttgtagtccatcctttaaagagtaagaaagtagcagttaatgctagtaaccgtgaattaggcaccactgaaagcacatcccgaatttctttaacaacaacattttatagtgaacactacaagtttttatatttaaaaattaagactctgtatatccttaaggtgctctatgctttaccagtaattcacagggtatttcaaatggtagaatcattttagcttctgtgcttcctttttctaaataatgcaacttgtaagagttgacattgtaataagctttataatagtataaccgtcaggagatatatatatatatatatacacatacacacacacacacacatatatactatacatatataaaatggggatattactattgtatgattaaatcattcttaagtccccaaggaaaaaaaatcataaacaaatagaaagaactaaacagaaaagaaagaaagaaaagatccctttgctatgagctcgctgtatattgataagtgtaagaattgtgttgcatgaataaccgctttgggctggatttgaagtattttgatgttgtgttttgcaaatattgaagttacaataatggcaacagaaaaggaacagatacacagctttacacttagcagaatgttacatttaaaatctgacaaggcgccaagatggtgactgtctcctctaaaccacgaaagagtaagatttgtgcaaccctcctcctcttccacctccttcaggagaattaaatgaatcaagactttggaaagacggggaagagccgggacttggcagtacttgaaacaggaggaatacaccagcctaaatgtacagactttgtagccgagcccactcgatcggtctgtgccttcacgtgaccaccatctgtgcctccctcgctccatccaaatttgtgtaggctgctccttggagctatgcctaaaatatagctacaccagagccctggaaactgtagtcaagtaacaggcctcactgttttttttctttggattaaaagtgtatatctctctactgaggggtttccagctttacacttctataggttgttctgacagtgagaacacattatgtacatgttttctattcatgtccagggcatgagaatcttaatattcttatacttccctttttgcatgcagtatgtctggaatatgtttataaaattttagcaaggggtgagatcaagggacaaaggtagagtggttatttaaagacaatcagaaatgaacttaaaagctgccctgcaaaaccaatcctttcctatcatgaagagtaccttcatattttctagagattgtctctgaaccgttgctacatagccataaatttctgtaaatcatgttggctatcagttcttgctattctcagagcactctatcatgtttttaggtgtatattgtgtattcaggatagcattaaaaagaactgatggcaaatgtattgactcacagtggaaacattcatttggatgaagaattagtggtttagcctttgaaatgaataccttgaatcatttcttctgattttctagtagtttattatctcaaatgattattatccccttcaaaaatactggtctgtactttggtgttgtggtttcatttttctggcattgatcaaatagcaaatacaaaataaagcatttctacatgtttgaggtggttgtttttaaaggggatatgtgtaatgcagattttctttattaataaaattttcataatctctgaaaaaa

SEQ ID NO: 1695 - protein, 271 aa, Homo sapien
GRPSQPCAALQGPGRRTRTHPPTQHRSAMGKNKQPRGQQRQGGPPAADAAGPDDMEPKKGTGAPKECGEEEPRTCCGCRFPLLLALLQLALGIAVTVVGFLMASISSSLLVRDTPFWAGIIVCLVAYLGLFMLCVSYQVDERTCIQFSMKLLYFLLSALGLTVCVLAVAFAAHHYSQLTQFTCETTLDSCQCKLPSSEPLSRTFVYRDVTDCTSVTGTFKLFLLIQMILNLVCGLVCLLACFVMWKHRYQVFYVGVRICSLTASEGPQQKI

SEQ ID NO: 1696 - DNA, 568 bp, Homo sapien
cccacgcgtccgccgggcgcgttccgttggcggcggattcgaacgttcggactgaggtttttctgcctgaagaagcgtcatacggaccggattgttttcgctggcccagtgtccccggagcttgtgtgcgatacagagagcacctcggaagctgaggcagctggtacttgacagagaggatggcgctgtcgaccatagtctcccagaggaagcagataaagcggaaggctccccgtggctttctaaagcgagtcttcaagcgaaagaagcctcaacttcgtctggagaaaagtggtgacttattggtccatctgaactgtttactgtttgttcatcgattagcagaagagtccaggacaaacgcttgtgcgagtaaatgtagagtcattaacaaggagcatgtactggccgcagcaaaggtaattctaaagaagagcagaggttagaagtcaaagaacatattcttgaaagttatgatgcattcttttgggtggtaacagatcataaagacattttttacacatcagttaatatgggattattaaatattggctataagtgaaaaaaa

SEQ ID NO: 1697 - protein, 88 aa, Homo sapien
MALSTIVSQRKQIKRKAPRGFLKRVFKRKKPQLRLEKSGDLLVHLNCLLFVHRLAEESRTNACASKCRVINKEHVLAAAKVILKKSRG

SEQ ID NO: 1698 - DNA, 3125 bp, Homo sapien
  Unsure 515-532: Unknown base
acaaaatgaaactaatctgctgcctctaatttccaaaaatgtaagaaattttacaattgtgaaaacctcatggatttgggcaaactgaatgtatataggcttttgacaaaagttggcacaaaaagtataaaaggaggcctattcttttcagttgaccttttgtaatatttgatttagagtattttggacaaatgctctataactctaatccatttattttgtaactgtacttaaaattttgaatcttgcaactaagtttagcctcattcagaatttttttattttgtgagcataatttattgttttaaattaattttttagcagatagcagttagcacttaatctgtaaattgaataatttatcaagtgcaggaatgtgttaatctaatgggttttgacttaaatgcaccaaagatttttagtaggtattaaatagtttaaaagactttaaattctttcttgcttgaataactatttgtccaaagaagcacagttgaagtcctagaataatggannnnnnnnnnnnnnnnnngttgttagtttgaatactgagattgattattgtgtttatatgtataaaaataggagcaaaagaaaatactctgggaatagtcatactgacaaaccatttataagtgagaatactgttttccttagtttaattaatacaatgttatgttttttagagatcactactaaatgctagataagcctattttttacactacactatcaaaataattttcgccttcgaatttttttaagtcaagttgaggttattcctgtaagaaacccaacctattttttttgcagcctaaaatcccatttaaggttaggggttggtccttatgccagcaagatttaaccaactgtaaagatagtagtctttgcatacatttaagtaattaaggcatttattgctgggagaataggagtagcaaaaatatggttttaaattggtgctttattaggtgacttccttttaggcgatggcaggtcatgaaataggtacactaataattttctatcaaccttaaaaagtgtcaaagcatctttgtagggtgactctaaactgctaattaagggttaataagtaattatcattggttgcttttcaatataattgcaaacaaattaaaaacacagttaaactaatatgtttataagcttgagttttcttcctaccatatcactctcatatatcagtgatgaaatgtcagattttgagcagtagctctttgacagtgtccttttatacccagtcttttctgcattgaatgctttgtgccttttcgatgtgttgtagttgcttagagttgattctgctggctagattgtactgattaatagatttttatttttatttttttttggttatgggtgttatgattgtgttgcctgctggttgggcaacttttttttttttaggttgctttatgtttatataggcaaattggcactaagtgttagtgtgaatatttgtttttatgatttatatatcattttaaaaatctctgttgtggcctttatagttactgtgaagccactcttgggcctgtctctatatgcttattagaggaatctgacaagtaaaataaaatgagtagtgtgtctgcatctgtgtctctgtttctctgtcttttaaataaccagtaaccataactacacagccctgcactgaatgaccttatttcagtttgcctaaaactgaacaagaggtgatggtttgagatgagtttctcattaggagcagcaacatcccaaccaatatataatgagttgatcaactcaggaaaaattaggactttaaagaaggttgtatttggatattctaagattcagtgccaaatttaaaatgcctagaaatgtattctacaagtagcatttctaaaactttaagtagtgttatagtaaatgctacttgctgttagagtgaataatggataatgtgagaataattttctaaacgacttctagaaactagacagttcttccttatatcctacccttttccacatttctctaatgtggggttttttgtttgtctgtctgttttgagggtagagggaatcccctccttatttcctctaaaattgtttttacttaagataccttttccctataatcttagcatgctttctgctctttctctttggaagtagcattaataagatagatgtaataggattaagatgtgtggaagatgagaaaaagaaggtttttgtagagagagtgcttatgttttgtttactcatgtttcaacttgctgtgtatgatcataaatctatgatcttgagaaaaatcctaaaacaatttaaatttagcctatgcagccaattacataaagagaaattaaggattatattcagaggagaaattaaggattatatttagagcacagaggttatacaaagaatataaccttgtttggtcaaattcttaggtaaagaaaagtaatcaatgcttgcattgctgttggagattctaaaagatgtattgaatgaagaggatgtacacatctcattgttactgcgtatttttttgcttggtattcctgcttgcattaaagctggacaatgtactgtgatgtaattacaaaatttttattccttctaacgattgaactcttcttatccctattgataaaactgtattacaattgatgagtgtggctgccagaaaataatacaaaactgggcatttagctgttccacattgtgtagtaaatgttttgattatggggatttacagtgtatattaaagtagaaatgcttttgcacttgttttcagtctcaaataataatttttgtttttaattaaggatgctttaaaagcaatgacagaaaaatctaaaatatcagaattaattattgtgaactgtgtgtaaaatatcttgtgagttttatacatactttggttgtctgatgtttcctaagtataaatgtctttatagaaaatttcagttctctgtgaagagtaggaagtgtactgtatattgaactagttctttgtgttactttgatatttaaaataaatataaagttctttggtcctaatacagcatatctaggttttattgaaccacattttcacaggatgggaatgcagtactctgaaaccaagta

SEQ ID NO: 1699 - protein, 28 aa, Homo sapien
  Unsure 515-532: Unknown amino acid
QNETNLLPLISKNVRNFTIVKTSWIWAN

SEQ ID NO: 1700 - DNA, 492 bp, Homo sapien
ggggtgccaatatacagttagaatatcattaatttgcactgtttggggaccccatttaagaatgctgaattttgccaactaagaagtaagcaaatgcaatttaaaaagtaaatttgagcattctgtattaaatatgtgcagttattatcacatgaagaaacgcagtgtgtcgggctgtaatattaccatatttgctgtcatgttctcccatctcagtgctgggaaatcaccatgtggaaaccaagcaaacgtgttgtgcatcagccggcttgagtttgttcaatatcaaagctgaaaactagcgaggtctgctgtactgcttattgaagtattgtgattattttaggcattgattcttacaaaatatatactgtaacagtatactttgtacagatttaaattttatttgaaaaaatgaaataaagtaggcaaaaaaataaagatgtttatttttcatgtgactaaaaaaaaaaaaaaaaaaaaaaaaaaaaa

SEQ ID NO: 1701 - protein, 47 aa, Homo sapien
MKKRSVSGCNITIFAVMFSHLSAGKSPCGNQANVLCISRLEFVQYQS

SEQ ID NO: 1702 - DNA, 1825 bp, Homo sapien
aaaaaataattgatttttacatcagagatagcaaactaagacctggggaggggggtcagcttttattttattttattttttttaagtttgctagttgggtcaaatgtgaggaggagggagtctacctgccacctcttctcttgcccctcttctgcccacacatccagcatccaaaatccattcatttaatgaattgataaagtgccgtgcaaactggtgcacaaacaggcccccagtccacgcagcctggctcctaggaaaagtggtgaccgggcgtgggggggcatgccgcagccctgggacacagtcgggcaccttccccggacccccaggccttggctgtgcctcaagtcagagagggtcagccttcaggccccggagacgagtgactggccgatcatttcacaataaaatcactcacttttggcaacttcactttttttaaggcacagtcagttccttttctcatgtacctcacaaaagatgaagaccatgtagtactctttttggtaaagttacagtgttcatgttaaatatcacttttttctacattgtgtggtaaaaagaactacgttaatagctatatcttaaatactgtgatttgactttttgaaaaatatcctaatacaaatattttactaacttacaatcactcatttaataagaaacatttggattcttttgaaatcagtgttaattgactcatattcttaaaagcctggctcttgaccctattggaaacacaaaggaagctgaaatcaaacatctaaaatacactgcgtacacgtgtgcgtgcacaagcacacacacacacacacacacacagctcttcatttctcctgagccatgcagaatttactttcaatgtggaaatctgttccctttaccacactgtatatgcacagagcacaagagaggctatctctagtcacttccaccagcgaggccttagactccgtattagaggccaccgatttcatacaacagtgtttcgctaaagacccttcactattcttgtttagtaaatagctgtctgctcttcagggaactgttacctatgggttattaccaaagaacgctggcaattggaaatgtcctgatggaaattctttgcacgtgccggttctctggcatcctccaggtggcccaacccaaagcagaaagcagaaaccacagaccccgtgagtctccccataccttgtttccaataacttggcaaaacttcttggtgcatattggttacaccctctgggattcataatgccattaggctaaaaccctaagagagagggttgacagaaacacacgcgagaatgaggcagatcccagagcaaggactgggcccagactctccacatgtgctctactagtgagtgccttatactctcagtattttggggcttacagcttcttatttgtgctaaaaaggtgcagttccaaagtaggaactgccacacaggccccagcatcctctctccaacttcatacctctctcctggtggggggagcgggcatccaggacctccggaatcaaggatgtgcagagaagagcgaaagtaatttttctagtcacatgaactgattggttccaggcaattagaaaatggctataaaataaccttaattttaaaaaaaaatcttgggtcttcgttttcctattaggagactgaactgaccacatgtattgatttatatcctgaatatatgggaacttctgtgtttgggatgtcctactgtaagactgatgaatgtacagagttaatttcagggtacagttttgccttaatggttttaaaaaataaactattttttaaaatttaaaaaa

SEQ ID NO: 1703 - protein, 64 aa, Homo sapien
KIIDFYIRDSKLRPGEGGQLLFYFIFFKFASWVKCEEEGVYLPPLLLPLFCPHIQHPKSIHLMN

SEQ ID NO: 1704 - DNA, 2448 bp, Homo sapien
gaccgtggatcggctggagcggggccgccgccggctgcagcaggagctggacgacgccaccatggacctggagcagcagcggcagcttgtgagcaccctggagaagaagcagcgcaagtttgaccagcttctggcagaggagaaggcagctgtacttcgggcagtggaggaacgtgagcgggccgaggcagagggccgggagcgtgaggctcgggccctgtcactgacacgggcactggaggaggagcaggaggcacgtgaggagctggagcggcagaaccgggccctgcgggctgagctggaggcactgctgagcagcaaggatgacgtcggcaagagcgtgcatgagctggaacgagcctgccgggtagcagaacaggcagccaatgatctgcgagcacaggtgacagaactggaggatgagctgacagcggccgaggatgccaagctgcgtctggaggtgactgtgcaggctctcaagactcagcatgagcgtgacctgcagggccgtgatgaggctggtgaagagaggcggaggcagctggccaagcagctgagagatgcagaggtggagcgggatgaggagcggaagcagcgcactctggccgtggctgcccgcaagaagctggagggagagctggaggagctgaaggctcagatggcctctgccggccagggcaaggaggaggcggtgaagcagcttcgcaagatgcaggcccagatgaaggagctatggcgggaggtggaggagacacgcacctcccgggaggagatcttctcccagaatcgggaaagtgaaaagcgcctcaagggcctggaggctgaggtgctgcggctgcaggaggaactggccgcctcggaccgtgctcggcggcaggcccagcaggaccgggatgagatggcagatgaggtggccaatggtaaccttagcaaggcagccattctggaggagaagcgtcagctggaggggcgcctggggcagttggaggaagagctggaggaggagcagagcaactcagagctgctcaatgaccgctaccgcaagctgctcctgcaggtagagtcactgaccacagagctgtcagctgagcgcagtttctcagccaaggcagagagcgggcggcagcagctggaacggcagatccaggagctacggggacgcctgggtgaggaggatgctggggcccgtgcccgccacaagatgaccattgctgcccttgagtctaagttggcccaggctgaggagcagctagagcaagagaccagagagcgcatcctctctggaaagctggtgcgcagagctgagaagcggcttaaagaggtggtgctccaggtggaggaggagcggagggtggctgaccagctccgggaccagctggagaagggaaaccttcgagtcaagcagctgaagcggcagctggaggaggccgaggaggaggcatcccgggctcaggccggccgccggaggctgcagcgtgagctggaagatgtcacagagtcggccgagtccatgaaccgtgaagtgaccacactgaggaaccggcttcgacgcggccccctcaccttcaccacccgcacggtgcgccaggtcttccgactagaggagggcgtggcatccgacgaggaggcagaggaagcacagcctgggtctgggccatccccggagcctgaggggtccccaccagcccacccccagtgaccctaccctgtccccagatgcactaacagatggggcccagcccccttcctccctggaccccacgggcccctgtcccaggaaccccgccctctgacttcttgccctttggaaatggtgcagcactctggcatttatcacccccacctgggtcccctgcaacctcccatcaaaggatgacccctaaacacagaggagcggggcaggcagggaggcaaggactggagctaccttgcttgttgggggactgggtacagttggcaagctgtgtttccatcagctccctgtcctcctttcttcccccgttattgatctatagacattaggaagggagtgggacggctcctccaccatcctcagccagtgcaacccattccctctgcttctctctctctctctctctctccctccctctccttccctaccctctcaccatctttcttggcctctctgagggtctctctgtgcatctttttaggaatctcgctctcactctctacgtagccactctccttcccccatttctgcgtccacccctgaactcctgagcgacagaagccccaggcctccaccagccttgaacccttgcaaaggggcaggacaaggggacccctctcactcctgctgctgcccatgctctgccctcccttctggttgctctgagggttcggagcttccctctgggactaaaggagtgtcctttaccctcccagcctccaggctctggcagaaataaactccaacccgactgg

SEQ ID NO: 1705 - protein, 545 aa, Homo sapien
MDLEQQRQLVSTLEKKQRKFDQLLAEEKAAVLRAVEERERAEAEGREREARALSLTRALEEEQEAREELERQNRALRAELEALLSSKDDVGKSVHELERACRVAEQAANDLRAQVTELEDELTAAEDAKLRLEVTVQALKTQHERDLQGRDEAGEERRRQLAKQLRDAEVERDEERKQRTLAVAARKKLEGELEELKAQMASAGQGKEEAVKQLRKMQAQMKELWREVEETRTSREEIFSQNRESEKRLKGLEAEVLRLQEELAASDRARRQAQQDRDEMADEVANGNLSKAAILEEKRQLEGRLGQLEEELEEEQSNSELLNDRYRKLLLQVESLTTELSAERSFSAKAESGRQQLERQIQELRGRLGEEDAGARARHKMTIAALESKLAQAEEQLEQETRERILSGKLVRRAEKRLKEVVLQVEEERRVADQLRDQLEKGNLRVKQLKRQLEEAEEEASRAQAGRRRLQRELEDVTESAESMNREVTTLRNRLRRGPLTFTTRTVRQVFRLEEGVASDEEAEEAQPGSGPSPEPEGSPPAHPQ

SEQ ID NO: 1706 - DNA, 778 bp, Homo sapien
  Unsure 167, 206, 266, 334, 365, 509, 581, 584, 597, 617, 639, 655, 670,714, 732, 740, 750, 767: Unknown base
ccacagcaaggtatgtaactttatttttctagcataataatttaaagtatttacacactgcacactcactgttttacacagatacgtattcatatatctatgaaccacatctaaaggtttctttgcaaagactcgacacactgtgggggggggggagcttccaagcntaacaaagaggacaaaaaaaagttttgagtcttttaaanacagccatgtggagcatctgtgaaaaccagtgtttcccccgttttaagctcccccagganacctctgaacagctatagcctatccacatgttggtatgacctgaaattcttctagctaaggtttcaanaaccaacatgtgcaagcagcattttttctanaaatctcaaaaaaggagaaaataaacctggcccttacgtagagaaatacatctatttctgaaagtaatctgtggggattgttttacagggacaccgattacaagggcagaatagcaaaatacactattactagtgatgcagggngcttttaaatgtcacttccagctaaatgatatggcaaaataacccaatcttcttttcccactatcaagtaanggngggtggtattttncctgaaaagagcaaaggttntttattaatgatacacactctnaacccagatcctttanaaattcttctattgnttttacttcactttcatacttttgcacaaaaaaaggggggtatncccccgattttttcctcncttgggcntcccaaattntaaaacaaatttttacnatgcttctgaa

SEQ ID NO: 1707 - DNA, 414 bp, Homo sapien
  Unsure 8, 26, 62: Unknown base
gaaactanatcccggggcttttaacnggtacttgggaaataagtattgggtaatcactaagnggacattgactgcaccaaaccaaagctatagaaagaaatgattgactttttaaaatatattcacattaactgtcctaggatacttctcttgaggctttggaaaacttcttccttgaaatttgcatatccactccagttctgtcaccaaagattttaatcttcagatcgcaatttcctctctcccagaaaaaagtactacaacaggctcaagggatatgctttggtggtcaagggattacactatggttttccttctgttcacaatggtatttacaggagaccttgtcatcagaggacgtactgaactatctttatgactttggatttgatcagaggtttaaaaaaaaaaaaa

SEQ ID NO: 1708 - protein, 33 aa, Homo sapien
  Unsure 8, 26, 62: Unknown amino acid
MLWWSRDYTMVFLLFTMVFTGDLVIRGRTELSL

SEQ ID NO: 1709 - DNA, 1188 bp, Homo sapien
  Unsure 490-523: Unknown base
aatttaaaatttgtttaatgcactggaaataaaattggacatatttcactgtttaaaaaatcagaaacaaaacaaagcaaaaccatgagggaaaaaaacagcaaataagcaacaggggaaaaaagctatgaaaaaaatatatttgtactgaatacacatacaaactacatcccacatgaaagattaatatcatcaagtaagaaaaatacatagtttaaactacaatgctgaaaatataaaaggaacctggtagttcaatggggatggagaaaacagagcattcctctgagagcagagatcttgtcattattgcaattaatgcccaaacaggttaaatgtggaagaaagtatggaggaaataaccccagccttcctcataccactggatttccacatcaccttttaacttatgcttgagctcccttttgagaaaaaatatttaaaaacaaattggctatgtaacaaatttgtgtgtgtgtgtgtatatatnnnnnnnnnnnnnnnnnnnnnnnnnnnnnnnnnngcttgagaaagtggtttttcaagatgtatgtgtacagtacacacatggacacgcttcagtcctctgacttcccatgtgctacctcatgtgtttctcttctcatgaggatttgcaatggatagttgtacaacctggggactgtcagtgactcattggtatcagcatatgctaaagaagctcttgaatccaatcttgaaacctgatctcccttcgtcaacattccccaataccaaactggcccgtttacccatacaaatgcacagtaaagggaagaacagcggtatttttcctagccaactgactctatcatttgtttaatgtttgctggtttttttctggttttgttttgttttagagcaggggtgggagtggctgtaacttcacaatcctaatacagtaaatgttttgcatcttccatgttttatgcaaaaacagacatttaaatcaataaataattgtgccctagactgaaggttaatgtttaggagaggaaaaaaattgttggaattttttctacatttttttgtgaagaatcttttttggaaaggaaggatacatatttttgttgtgtaatattttctatttttgaatgcattttattggtacaagactgtttttttggtgaagacattatttaaaaaaacagtcttgtaccaatagtcgac

SEQ ID NO: 1710 - protein, 67 aa, Homo sapien [sequence omitted]

SEQ ID NO: 1711 - DNA, 4066 bp, Homo sapien
cttcgtgtcaaagccccagccaagcctggagatgagggcaaggtggagcagggcatgaaggactccaagtccctgagtttgccgattctgcggccagctgggaccgggccccccgccctggagcgtgtggacgcccagagccgccgggagagcctggacatcttggcccctggccgccgccgcaagaacatgtcggagttcctgggggaggcgagcatccccgggcaggagccccccacgccctccagctgctctctgcccagcggcagcagtggcagcaccaacactggcgacagctggaagaaccgggcggccagtcgcttcagcggctttttcagctccggccccagcaccagcgcctttggccgggaggtagacaagatggagcagctggagggcaagctgcacacctacagcctcttcgggctgcccaggctgccccgggggctgcgcttcgaccatgactcctgggaggaggagtacgatgaagacgaggatgaggacaatgcctgcctgaggctggaggacagctggcgggagctcattgatgggcatgagaagctgacccggcggcagtgccaccagcaggaggcggtgtgggagctgctgcacacggaggcctcctacatcaggaaactgcgggtgatcatcaacctgttcctgtgctgcctcctgaacctgcaagagtcagggctgctgtgtgaggtggaggcggagcgcctgttcagcaacatcccggagatcgcgcagctgcaccgcaggctgtgggctagcgtgatggcgccggtgctggagaaggcgcggcgcacgcgagcgctgctacagcccggggacttcctcaaaggcttcaagatgttcggctcgctcttcaagccctacatccgctactgcatggaggaggagggctgcatggagtacatgcgcggcctgctgcgcgacaacgacctcttccgggcctacatcacgtgggcggagaagcacccacagtgccagaggctgaagctgagcgacatgctggccaaaccccaccagcggctcaccaagtacccgctgctgctcaagtcggtgctgaggaagaccgaggagccgcgcgccaaggaggccgtcgtcgccatgatcggctccgtggagcgcttcatccaccacgtgaacgcgtgcatgcggcagcggcaggagcggcagcggctggcggccgtggtgagccgcatcgacgcctacgaggtggtggaaagcagcagcgacgaagtggacaagctcctgaaggaatttctgcacctggacttgacagcgcccatccctggcgcctccccggaggagacgcggcagctgctgctggaggggagcctgaggatgaaggaggggaaggacagcaagatggatgtgtactgcttcctcttcacggatctgctgttggtgaccaaagcagtgaagaaggcagagaggaccagggtcatcaggccacccctgctcgtggacaagattgtgtgccgggagctacgggaccctgggtccttcctccttatctacctgaatgagtttcacagtgctgtaggggcctacacgttccaggccagtggccaggccttgtgccgtggctgggtggacaccatttacaatgcccagaaccagctgcaacagctgcgtgcacaggagcccccaggcagtcagcagcccctgcagagcctggaagaggaggaggatgagcaggaggaggaagaggaggaggaggaggaggaggaggaaggcgaggacagtggcacttcagctgccagctcccctaccatcatgcggaaaagcagcggcagccccgactctcagcactgtgcctcagatggctccacggagaccctggccatggttgtggtagagcctggggacacgctgtcctcccccgagttcgacagcggtcctttcagctcccagtctgatgagacctctctcagcaccactgcctcatctgccacgcccaccagtgagctgctgcccctgggtccggtggacggccgctcctgctccatggactctgcctacggcaccctctccccaacctccttacaagactttgtggccccaggcccaatggcagagctagtgcctcgggccccagagtccccacgagttccttcccctccaccctcgccccgtctccgccgccgcacccctgtccagctgttgagctgcccgccccacctgctcaagtctaagtccgaggccagcctcctccagctgctggcaggggctggcacccatgggacaccctctgcccccagccgcagcctgtcagagctctgcctggctgttccagccccaggtattaggactcagggctcccctcaggaagctgggcccagctgggattgccgaggggcccctagccctggcagcggtcctgggctagtcggctgcctggccggggaacctgcaggctcccacaggaagaggtgtggagacctgccctcgggggcctctcccagggtccagcctgagcccccaccaggggtctctgcccagcacaggaagctgaccctggcccagctctaccgaatcaggaccaccctgctgcttaactccacgctcactgcctcggaggtctgagcagagggaggcccccaagagtgccattgaccaagagacagcagacagcctgcctcctggggcgtgccggcacctgcttcagctactgcctcctgtatgcatgagccggatgctgggcaggatccctgcctacgcccgggcccgatttgcgctttgccggactggatggagtggaggaggcccaggccacagtaccaccccacctgcccaggcagcccctcgtcacctactccccgaagttaccagctcagctcgagtcttcagggctgggctcctaggctgcccatcctacttctaccctcactggcctccagtgggattcactcctgccctgcccccaccttcccagtcccacaggccacccctggcttgggctgggttctgtgaagttacgtatttattgagcttttggttcttttataaagacttgtctagactccactgggaagagtcctttgctttggggcccagtgactcggggcacttgagttcagggcggcctccttgtgttcctgtgctcctccacttgccacggatgggccacggatggagcttgccatgggaagcactgggaagtaatggggtgtggggtgccaccagaccaacacccccagacttccccaccttcagccaccatcagagcctctccccaggtgccccccggggattcagggctgaatctgcccagttcccacactcaggccagccctcttgggaaggtgggtcctccatgggggtcccttcaggaactttttttttttttttaatacagagtctcactctgtcacctaggttggagtgcagtggtgtgatgtcggctcactgcaacctctgcctcccgggttcaaacgattctcctgccccagccactctagtagctggaactgcaggtgtgcaccaccacgccgggctagtttttgtattttaagtagagacggcatttcaccatattggtcaggctggtctcgaactcctgaccccaagtgttccgcccgcctctgcctcccatagtgctagaattacaggcctgagctactgcgcttggccccttgcggtacttttggcccaacctcctccatggctggggacgcggaggccgagagagaagtcacttgccctggctctaccttgaagtggttctcagggttggggcgagagtcggggtggggaccgagatgcagctctatcctgtgcccctggtcgcagcaggcagcccagcgcttcgcgtgttctacttggcctgtccgctgccgcctaatgagctcaggtctaggccgagcagagggggcacctggtcggactcggttgggctcgggcggccccgcctccccccgcccgccaggcgggcccttctcgacggcgcggggcgggccctgcgggcgcggggctgaaggcggaaccacgacgggcagagagcacggagccgggaagcccctgggcgcccgtcggagggctatggagcagcggccgc

SEQ ID NO: 1712 - protein, 864 aa, Homo sapien
LRVKAPAKPGDEGKVEQGMKDSKSLSLPILRPAGTGPPALERVDAQSRRESLDILAPGRRRKNMSEFLGEASIPGQEPPTPSSCSLPSGSSGSTNTGDSWKNRAASRFSGFFSSGPSTSAFGREVDKMEQLEGKLHTYSLFGLPRLPRGLRFDHDSWEEEYDEDEDEDNACLRLEDSWRELIDGHEKLTRRQCHQQEAVWELLHTEASYIRKLRVIINLFLCCLLNLQESGLLCEVEAERLFSNIPEIAQLHRRLWASVMAPVLEKARRTRALLQPGDFLKGFKMFGSLFKPYIRYCMEEEGCMEYMRGLLRDNDLFRAYITWAEKHPQCQRLKLSDMLAKPHQRLTKYPLLLKSVLRKTEEPRAKEAVVAMIGSVERFIHHVNACMRQRQERQRLAAVVSRIDAYEVVESSSDEVDKLLKEFLHLDLTAPIPGASPEETRQLLLEGSLRMKEGKDSKMDVYCFLFTDLLLVTKAVKKAERTRVIRPPLLVDKIVCRELRDPGSFLLIYLNEFHSAVGAYTFQASGQALCRGWVDTIYNAQNQLQQLRAQEPPGSQQPLQSLEEEEDEQEEEEEEEEEEEEGEDSGTSAASSPTIMRKSSGSPDSQHCASDGSTETLAMVVVEPGDTLSSPEFDSGPFSSQSDETSLSTTASSATPTSELLPLGPVDGRSCSMDSAYGTLSPTSLQDFVAPGPMAELVPRAPESPRVPSPPPSPRLRRRTPVQLLSCPPHLLKSKSEASLLQLLAGAGTHGTPSAPSRSLSELCLAVPAPGIRTQGSPQEAGPSWDCRGAPSPGSGPGLVGCLAGEPAGSHRKRCGDLPSGASPRVQPEPPPGVSAQHRKLTLAQLYRIRTTLLLNSTLTASEV

SEQ ID NO: 1713 - DNA, 3324 bp, Homo sapien
aaatttattgagctattagatacgatcttttttgttctgcgcaagaaaaatagccaagtgactttccttcatgtattccatcataccatcatgccgtggacctggtggtttggagtcaaatttgctgcaggtggtttgggaacattccatgcccttctaaatacagctgtacatgtagtcatgtattcctactatggactttctgcattggggccagcctaccagaagtatttgtggtggaaaaaatatttgacatcattacagcttgtccagtttgttattgtcgccatccacataagccagttctttttcatggaggattgcaagtatcagtttccagtctttgcgtgcatcattatgagttacagtttcatgtttctgctgctctttctccatttttggtaccgtgcttacaccaaaggtcagaggttgcccaaaactgtgaaaaatggaacttgcaaaaacaaagataattgaagcccaacataagtctatgatcgaaactgatacattgtcttccttgacaatcaagagatatttacctatgcagtgcattttgtatatttttcaaaactaagagcttgtatttttatggtaagttattgggatgtctgatatttgagagcccgaagcttccagataacagtcttctgataattagagcctacagcagccagaatttgtttttgtttttgtttttgtttttttagctgcttttaaacctaatccaaaggttttgtttaaaacattttgttgcagtgaaaaaaagatatgaagcaatacagtactcttcaaagaagtccaataaagatgaaaaatatcattaggtattttgagcacagacggagatccatgtgataaaatagattccttctgctgggtctggaaagtctggaaaccacctgtaggccctggctttgtcatttattgactgtattcagaagatactatatttgctctagagttaactcccattttagcaagctagcacaggtgaaaattgagtgagtttttgataacttgtcatttaaaatcattaatgataattttcaatggatcttttcagtagccatcaccagttttgctgataagacttcctcacaacccatttgttgtacaaactgtttcaaagtagcaatcctttgggttagtacacttgataccaagtttcattcagttgattattttcaaaacaaggtgatttgttttaatgggttaatgaatactttgctattactgttttacaattaactttgtatatctctggaaagaggtgaatttgtcaatgaaaaaagtattgtgtagttcagtgggaaaaacctgttgtctgttatagtatcacatcactttcttacattgtcatggtttaaattattatcttggtgaaatatataggttagatacttaaatgttcatattattagcacactacaggtactacccttaaatcataaataatattacccattgtacacagtttccagatatgagttagagtggctgtgaagcaactagaggcaaattgtggcacagagaatatccaggggaaaattgattatgtaagcaagggctgttctactttgagagagagacagacagactacataatagtaatatattatataattaatgttatagatacactgaacaataaaacattttctggaattatgaattaattaacaacctggatttctgtttccagacctataaaccatgtaatgaaggactgaaattcgtttggcatacactttgtttctttaaaattgctagtttctttctgttatttttacattttcttgtcagagaatcaaaactattagtcagtagagttttgtccatgaaataatatttggacatttgtgaatttttccctattttttttcttcttttatttatactcaattttgaagcactgtttatgtttgtaggactttaaacaattagtacttaaagccccagttaattttgaacacacagagatacttattgtactctgtgtacagtaagtatttttatgtttacacttaccagattcataaggttatttgcctttaagtgatcttttgtgattttacttgattacagcatgagaaggtaaaggttgataaatgggagtaattacatatatatatataatttattatttttttttctgaagcagagttttactcttgttgcccaggctagagtgcaatggcacaatctcggttcactgcaacctctgcctcccaggttcaagtgattctcctgtctcagcctcccaagtagctgggattacaggtgcccgccaccatgctcagctaatttttgtatttttagtagagacagggttggccaggctggtctcgagctcctgacctcaggtgatcctcccacctcggcctcccaaagttctgggattacaggggtgagccactgtgcccggccataattttatatttttagaaaataaagaatgaaggacaaaagagcacagctaaatgaaactgctgctctaatttattccactggaaaggtctcaggactccttaactgttttccaggtttggctcttcatatctaacctgtgctaaaatgagaaggtatgctaggtgctgttagaaatcacaccatttccaaagaacccaagtagtatagagaccaaaatgaggcaaaaataaaagagatgaaacaggagagtttatttcttgcatactttccgaccttcatcatacaacctctcctaacctccctgtagtctttaaaatgtttaacttgcctataagctaacatgtaataaaacacatactcaattatatgaatagaagtggagagccagaatgctacaaaagaaatcacagctgctagaagtatcctccatagaaacatcaacatgattgtggatcaaaatgattttcactggatatggaatttgtatgggccatatttattaaaagagttctgtgtggtcacatagagttcctttgggatttcatcccacttttcaggacttaatttgtttgggtttgcttacctaacaagcaacaacaacaacaaaataaatagttccaaaatctagtttattacataaatctctatgaatccttgagggcctatatctatattataaataaatacaaatatagatttttaaatatctatgggactttgccatttacagccttaagtataaaattacgagattatattctttccattaccctttatttctgctaactttttaaagactggaacattctgtggatgttgtcaaagtttgagtttgtttttccctgtgtattataataaatttgtggtattgcaaaaaaaaaaaaaaaaaaa

SEQ ID NO: 1714 - protein, 158 aa, Homo sapien
KFIELLDTIFFVLRKKNSQVTFLHVFHHTIMPWTWWFGVKFAAGGLGTFHALLNTAVHVVMYSYYGLSALGPAYQKYLWWKKYLTSLQLVQFVIVAIHISQFFFMEDCKYQFPVFACIIMSYSFMFLLLFLHFWYRAYTKGQRLPKTVKNGTCKNKDN

SEQ ID NO: 1715 - DNA, 6584 bp, Homo sapien
ggcggcgcagtgtgctgaagtttgccatgatttctctggaaatgtaataactgttctccaaaagtgaatgtggaaacaattttttaaacggacacgaggcttaaaatgaaattattttaaagtatgctctaattatatagatagatagggccaggtttcctaaaacattttccctaaactgttcatttgaggcttttatggtaagatctgagtatgacagttaggtaaatcttttatgtcctaaatctttatataaagagcagtttttaaattagtaacaataataaaagatatgaacttttttttctgtttctagtttcattcataaaatgaacacagcagaatttaagagtgcaacgtttccaaatgcaggaccaagacatctgttagatgatagcgtcatggagccccatgcgccatctcgaggccaagctgaaagttctactctttctagtggaatatcaataggtagcagcgatggttctgaactaagtgaagagacctcatggcctgcttttgaaaggaacagattataccattctctcggcccggtgacaagagtggcacgaaatggctatcgaagtcacatgaaggccagcagttctgcagaatcagaagatttggcagtacatttatatccaggagctgttactattcaaggtgttctcaggagaaaaactttgttaaaagaaggcaaaaagcctacagtagcatcttggacaaaatattgggcagctttgtgtgggacacagcttttttactatgctgccaaatctctaaaggctaccgaaagaaaacatttcaaatcaacatccaataagaacgtatctgtgataggatggatggtgatgatggctgatgaccctgaacatcctgatctcttcctgctgactgactctgagaaaggaaattcgtacaagtttcaagctggcaatagaatgaatgcaatgttatggtttaagcatttgagtgcagcctgccaaagtaacaaacaacaggttcctacaaacttgatgacttttgagtagaagcctgagaaaaaaagagaggtgaactgttgcttctacgtgagcatgaggacctgataaaagagcgccagctataaaccatcctgtgccaggaagagcccagaggctctgtctcagtcgttggagttctcaaccaaaaaagcactaatttcagggaatgatttgagatattcccagagaacaaattggagttgcaaaacaaactgccatgaaccatgcttcttatctcagaactgacctgtggaaaccactgccttaaaagaatgaaaggaaaaccaacatgaaacaccaaatagtgtgtgtgaatcttctggcggtgctgtgcttggaatagatcgtagctaatttgcatttcttttaactttgtaataattttagaggggggaattgccttttttagatatgctttaaaaaggaaaaacatactcttgtggattccatcaggagctggttttgaaccgaggtgaagagacttagcagggattgtaccagcagcccacctgcaaggtttgttctccctctagtagtctgcaacctcactggctttctcacagcaagagtgtaggaatgagaaatgttagtcatgtgagttcttgggtttgtttgggattgggtgggggtgtttgttttgttttggatgaggggagaatttttttaaacactaaacttctgaaatgtagtactgtaaggggaacattatttcctgcaggaggtacaaaggctgtgtgttcatttgccagacgctttttttttaaataggttccagaaaacatggttgtttctaactagggttaaagtttagctttctatatgaattcattgttggaccacagatctgcttaagtaaagagctataatcccaacctaaacttttctgagattttacaataattagatctttttccaagttaattgggttttcccttctcccagtcataggtggtttttatcatcaagacagactgatattttgtcaggatattttcttttacagtgtttgatgtgcataatgccagagttatttttttattattcattttctctctttttgttcaatatgagattcaggatcatatttgtttaaaaggtaacacatagagatgtatgtatatattttgttataagacatacaaaataattttaagagggataaaggtgaaaatatcagattctggaaattttaagtatctaaactttatacttgtatgatttaccataaacataccaaaacatttttctgaaaatttactgtcggtctctgacatgaaaccgtattttgtcagtagttgaccaagcagttttatgagaactcttctatgcaatgatgcatttaatttctaaagtaaatgttgaattattaaaaaaaaagtttgaaggtaagatgccttagaattttaatgaaaaatgacactcaaacaaaggctatatgtcgaatgttataaactcttgagacataatgaattttagcagtggcctagagtaaggtaatgctttgtgactgatatctactaatagacttctgttactttgggcctcacataaaatttctcacattcgtattcttagagaattttatacttttttattataagtattttgcccttgagtccatgaaacttcaatagaaaatattgcttatacaataattagcttaaaatccatccaaaggaaaagagaagagctttttttgagtgttaagttttttaatttagtattctgtttggaaaagatgttaagagttcaaatatgcttcttatgtaacagaaataccattatttctggggtttagtgacacaggctggagaggacaaaagtttcctgtcctgaatgatttttcaattaatgctctaagcttaacccatgttgggtaatagaaagacatagccagcagtattactacgtagaccttgcacatcttacttttgttttgcatttttaaaaatttcttaatttgtttatttctcttcagaaatagcgtttttaacagtgtatgtgctttttttaaaaagtattgtgaatgagaaccctgtggattttttttatttcatttgtttgtcataataagctaacgtagaaatgttgtaggttaaccatatctgtggaaatatgcagttggaagtcagagcctgacatcacatagttttgccaaagggagagagctaagctggaagatgtttttgatactttcggctctaaacattaatggatgtttgcgtagagtaagatagcgttcaaatttggttaatagtttatagatagacttgtggcctctgactgactaaatttcttaacagcacagaagtcgttgtttttctgtctttaaaatttattcattcagaaaattagtcattgctttttaagattattttagcatttgaagcaaattgaaaacagaaaagtgacttaaaatagtgtaggtgaattttttatctataatttaccaaataatacctgataataattcaaagaaaatatgttaccaaaatatattaaatatataggtagttcattcgtgggaagatgaatcttcttattaagcctgccctcaattgtaaataagtgactcaaaaactcaaaatgttcatcagcattcaggtcatttgtttcacccttagccaagaagaactcattagaaattcagttataatttcaatttaagcctgtttatgataagcataatgattggcatgttatatagcctgttgaaaataactacagaatgaccttccagagcactgtttttggcctcgtgcccgctctgttcaggctctgcttgtttttcagaatatgatttttacctccagacagtaagaattgaacaagaactgatcaaacacaccttcctattttgttttcttcactatgtaaatattatttgggcaaacattacaaaaagggatccaaacaatttgagtttcagtatttttttctccctaggcatgtgcttcaatttcaaatatttttttctgtgtggaaaatgccatgtaactattgcactaccttctgtgtggactgtgttggtattggttctttctgtatatcaaaagtcagggtgtttataactgcaaagtttgtataagtggctttattcctcttctagaagatttatgaggagcctaggaagcactattggtacaggaggaaaaaagaatggaaaacatgtttacagactctagctttccttattagcttaaactggggccctcaaagagcagcctgttgatcttttggccaaatgacttgagcataagtcttttatttctttttaaggttaaatcgtaaactgtatacctttactactgaaaacaaaactatagggcatcatactaattgaaaatcaatagtaatgggttccatccattagctttttaaatgaatagatctggtattgatttccttcctgtttttttgaggcacattcctttacaaccagtgtttaaaccaccacgtaatcatcttctgcaaacaaggggtgccagtgttgcctaacagaagataatctttaataaagcaaatcctctgcttcaaaggtttttgaaataattggatccctttttgaaaaggaagatgagtttaactgtgtccaggtggagtaatagtactgctgttgcatgaatagatgatacaaagcaagtgatgaggttggtatgacttctttagtgaccttttagggtttgcttttattttcctctcttttttgtattatttctttcaaacatagtaaatatatgattttacagccaaagtggtattctgttttttctaagctttgagatacaaatattgctatttaatcacattgatgatgaattactttccatgtgaaccttctcaaaatgatttaagtacctttgattttgctcccctaaaaatggcttgtgtctaaagtgacatttttttccctatttggagggttctaatgaaagagatccaggcataaaaactcttttgcttattgaaagcaatttgattacacctatgtttcaggttatagtggggagaaaatttggtcagtgccttattatttgaagagcaattttagggcatcaagtatgacaataatcatgtgccctcttgctcctcttatttcaggagtgtgtgctatccctctctccaccagcttaatctttctcaccccaagtctaacaaagtctttacagaaacctctgtaggtgattgttgcagtcttccttggtttttgagtctttttaaacaagctcctaccctgcttctatccttttagagtaggagattaaaaataaacccaccccagtcaacctttagataagcactcttaaaaacaaatttgaagagcactcttcagccaagttcatttttattttgttgttgatgttttgagcatacatttaattgtaaggccttttggaaaagccctaaaagaataagatacaaccagaaatatttgagttttgttaaatgtactgaaatcttgtaatgaaaatccctttggccagaaatgagatttatttccatttatttttacatttaagtaacactcaaaacaaacaagtagtcacttaacctgccagttattattttcttgaaaatatacaagaaagtaaaaatatctctaatatataagttaaaggaaagttaagagactaagctagttttttcagtgaaagcaaagttggaaatattttgcttctctcagattattggaagacctagagctactggatgttaacctgaatcaagatgttcttttcacatttttttaaagggctagtatgttccagagtaggcaagtagtcattcaagccaaatgaaagagttaactggtccttgaggagtgttagcaaaatttaaattttgaccctggccatttgtactacagaagtgattatgggattaaaagaatacataattacagtgttttgggattgggctcttttttttcttaatagaaaagcagaaacttcataaataatagctgtgctttagataccagataacaaatattgtttcccctgaagatatgacctactagaactactcacatatatagtccaataattactgacttaataggtatggtaaaatagctgataataagtcagactctcaagagtttctgtaccttgattattgacaaattcattgttttacatcctactaaagaacatgtgtgtggggagggggtggggaactggttcacaacataatctgaaggagatcaaacatctgtaaggacaggtacccagtgatgataatatatctgaaaacacaagccatttttattctttatcccaattaacttgaggtactctaatgatgaagcactcgattgcactatgacctccttgagtgatgtgcagcttggttcctctctcactttttgtttctttttaatatgcaaatgtgagtgtgcgatcttcagtgtgtctgcataagctaacttaagatgaatttaagtacagttttctgaaatatttctattgaaataaattacttaaaattatagattgggtgaggatgtttttgttactgtatttgcatttttatcatgaacttttaaggtgcaaataaacttta

SEQ ID NO: 1716 - protein, 232 aa, Homo sapien [sequence omitted]

SEQ ID NO: 1717 - DNA, 5425 bp, Homo sapien
tttttttacgttttcacttcatttattcctttgaaacaagtcacttaatacagcatttagatatttaaagtcatacacctcataaataaaatcaatgcatcttaatgacaatggcaaaatcacataagagttgtagaaaatgaagttagacatcttccaggtagcagcagtgtattacttcaaaaaatgctggcaaataggcaaaacatttttaaaacaagaaaacactgtccatctgcattaagaaaaaatattttcttatgctgttttgcccatccctactttttcaagtcatattctaaagctctaatttgacggtctttacttgtggttttctttttgcgttaggaacctctgtctctactgcattaatacagaaactataggaatattgttgttctctaacccttttcacaaactattcatattcattctgtatttaggctgaattcaaatttttttcaaggaaaaatactattctgctaagtacatatttcctgtaaacagctggagtcctgaatggcaccaatgtgactggaaaactgacaaaaattaggtcccctggtcctttaagtaacttacgggctaattacatagcctataccagtttataaagtagactcatgtaatcatattagaaattctgagcctaagatgatcctttctgtttacctacaacttaatcaaattatatcttcaccattcctaaactcctatatgttggttagtacttttaaaaacatatgtataaaagggcatcatggcaaaatgcttataattcatggtttcatactttaatgataagctttttcacctatggccatgctacattctatgacaagaaatggggaagaagggttgagttgacacaaaggcattgctttaaaaatgtttggaaaagggtaattcatgactaggaatgcatctatttgacaatctcttctttatcagtggtactttgtcttcttggcccttttctcccttcactctaccatgagggggttaccaacctcctttaaatgtgtatgaatcaagacctaaatcagcaccctacaattcaacatcaataataattttaagtcaaacattcaaagcactgtaagcaaaatgctagataattttgagaaaaataaacactctcccacaaccagggacacttaatattctttttatgtggaatgaaatgtgctgaaatactgtaacataagaaaacagctttagtttataaactagcttattcaaatcaagtgtttcactttggacttaaaatgatgccacttgtatatgacacgtttaaggcctctgactcaaaaatcagcttccttataagtctgcttggaaacaagttttaaggatcgaatcttttagaaattatcagtcatctctgcactacaaggacaaatttgaatactgcattgtataataatacaagatattcacataataataagtaacatttttaatgctagggcacagaccatgctcctaatagttactgaaattgagttctactgttatcaaaacaccagaatgttgtgccaatagatacactctacactgatggcaatctttgattaagaagagctgatggttagtagctcaagaattgtactttaatgtccttaattagatccctagagggccaacatgtaaacttttattccatatatattttttaaagtgctgcaaacaaatgtgtctccacacatgaaagaacataattcttagtatgtttaggaaggccacctgatttgtcaaaaaaaaaaaaaaatcactcttgcttaatcttgcatacttcccattccattttttttcccaaaaagatgtaagaaaactatgtttagcttagggcaacttgcaacacccacgttttaatccctccacagaaggaataaactagagaagcaagttaggcatgggcatttagggacacagacaaattagatagataacataatgttagttaattcctcattattattttgctgggacttcatggaataatcaagcggcatgactacattagttgttaaaaacagggtcaaactgaccagcagtcaagcgtcaagggtaccacttgactatgctaatttcatgggaaacaatgaagaaatcaaccatgaaccattagcaaaagatggaacacactaatgtcttcacttggctaacacatcacaaaatttccaggtatgttaaattttagcttctgaaatcactttattcaggagtgaatcttcatagtactacacctgacctttaatccaaagaaaagtaagagaaaggaagaagggtggggtgggaaagtgaggtctttattcactttgccactaatataaactgtcattttaatttttaaaaaaattcctctatggcaggcaaaaactcaatgaataggaaagatttcattctgctctagtacaaaacttaagacatttaatcctcctgaaagttgtaagtccatagattttcaaaattcccaagatgagaatttactccctttaataactaattccaagagtttaataagcacagtaaaaaatgaaaaaacaacaaacaaaaagcaaacccctgtaaattctgtgaggcttaaaagcttgagtttagaatgagcaaaggtttaggtttttaatcctcaataattaaatcagatggtccacaaataaagcttcaccttgaattttccaggatcagaacactaaagtactagtgctaaatttcagcagactaaagagtcatttttgaaaggaatttgacagagtatcagtgtccaaccggtaaatggacaacctagataacagataaaatacaatgaaataagatcccctgaataaatacttgacacttaatatgtaaacaaagcccttacaatgaaggggtttaattctgtaaaatatcagtgttctattcctttccatttgttaaatttacccactgtagaaaatatatactgaatataaagtgacagaaacttatgttggaacatatcaaaacatatgacagaaacatatcaaaacatgcctggcacagtataaattactcaataaatatttgttgcacgaataaacttctagatctaaagctgtagtaagcaaatatcaactctgtgtcctgaagtagcaaagaaaggaaggcaagctttctgagtaatgatgcataaagctcaatttgataattgttatctagtggtatattcttaatttacagttttaaatttagtattttctgggagaagtaaaaaagatacaaaaccaaaaccatccagatcagatgagagtcaggtgtggagagattttcaatcccattaatttgaacacattatgattgccaaacattaagtatcataagctcatcagtgctatttttaaggctcagtaaaatagaaaactaaacacttttaagttatgctgaccataacagcttatattgtctaaaataactatgcacacaaaaggtactcaagaaatgtcatctgacaatttcaaacaaactttgtgaattgttccttaaaagttcttttctcttatattgttcaaatgttccttaattttatatggccaccttcaccaagtgaaagtgctaaaaataaatgtcaattttaaaacatttgctaggaagatatgctgaaaaagatccaagtgctttaaagtataccactgaatttctaagtgagatacttaataaaaaagagaccaaaataacaaaacttcacattaagcctcttcacattatgtgagataatacataacaaattataatttagcatccctgatcagaataattaagaaaagaggtagaaaacttttatctggaagatcttgtagtgaagctaagttttagagggtgtgccttgcggattagtccactaagcaaatggctacacatctagtactaggaagaagcagaattctgagaaagctgcataaggcaaggatttacaattttttctattttggaagtgaaactagttcattcaacagtattactccaattgctttaaaacttcaaaaatcaaagtaaaagattgcagataagcaaagtgctaatttgcagaaatgtgaaattatttaaaataactttagtggagggataaggctagcacaaaagcaaacactctttaggtgtgcaaaaaatcttacaaaaaccaacccaaagcagagcattattacttgaaaaaaattttttggaggaagtgctcttaacaaaaagctgagaaaattaaatcccccccgataaactttacgcaaatgaagaaaaaactgaggactcgaatttcaaggaatttcaattaaaaaagtaccctgcttaactttaaaatgttatccaatgtgacaaagaccaatacatgaattgcattaaaacacgaggccaacggtcttttaaagcttcaggaagctgctcaggcacctattccctcatacattctacgttttatatgctagagatcttaaacagggcacaatcagttcctgttttgtgataacattctcaaggatgagactcatccctgtaaaaattgcttgtgatgtacttatcagtggttaagcacacatttataatgtctaccaaattgcaatataaaatcagtttggacaattctgagtatcttcatttgatgaatcaattcataatttagaaacttaactcattcagagtttttaaaaagactcagttactggagacactgtggtaaatgtccagtggactcacaggaggccttccacattacccaaaatgtgatgctttcttctacaagttaaagctgctgggtgctagtttataatactcaatctcaatcgtatgcccagtggactcacaggaggccttccacattacccaaaatgtgatgctttcttctacaagttaaagctgctgggtggtagtttataatactcaatctcaaccttcaggtcagtgtcagtaggtggctaggatcacctattctgtcactccagcagaaagaggcatgtatgtacagtttaccactgtagacacacatctgtaaacttgcacactaattttaatcttaacaaggaatttcagtgtcttagtggttttaagttaaaaggatggttcaagcattgtatcctttgttctttagggttaccatagcttattggaaaacccagagcttcaggccgaggccaagtcttactttgaaaagtcaaaggagcagctgacacccctgatcaagaaggctggaacggaactggttaacttcttgagctatttcgtggaacttggaacacagcctgccacccagtgaagtgtccagaccattgtcttccaaccccagctggcctctagaacacccactggccagtcctagagctcctgtccctacccactctttgctacaataaatgctgaatgaatccgaaaaaaaatctatgtcgggtgcggagaaagaggtaatgaaatggcagga

SEQ ID NO: 1718 - protein, 21 aa, Homo sapien [sequence omitted]

SEQ ID NO: 1719 - DNA, 864 bp, Homo sapien
aaatataaatttaaaccataatgagataccactgcatactccctagaatggctgtaatgaataggattagtcacatggtgcaagaatggaggatcatctggaactctcatacactgaccgataggaatgtgaaatggatcaactactttggaagacaattgggcagtttctttcaaagtaaatgtgaagatgccatacgattcatccattccatttctaattattcaagagaaatgaaactgtatatccacaaaaaagacttgtacacaaacattcacagcagctattatttattggtaatagctaaaaactgtaaacagctcccatatccatcaagtgtatggataaacaaatttggtgtatttatacaatggaatactactcggcaataaaaagaacagttgatactctcaacaacctagatggacctcaaaataattcggtttaatgaatgaagccaaacttaagaagagtacattgtatgtacttggagaactaacttcttgcaatagatttttaagcactattaggagcatatgacttaaacagtttttaaaagtcagggagtaagtatgcttaaataaaatacaatctgtgaaacaaatctctgaattattatcacttcactggacactctaacttgaccatatttctgactttaatgtaactcactcttattccgtagtcacatgtttgcttgctcattggttcacattacatttattcagcatctgcttgagccaaggcactgtaactacatgttttttttagttacctacttttgtaaggtcctgtttctttggctacatctgattacagtaaacataggaagtttaataaaacaattttcatgaccgaaaaaaa

SEQ ID NO: 1720 - protein, 123 aa, Homo sapien
MRYHCILPRMAVMNRISHMVQEWRIIWNSHTLTDRNVKWINYFGRQLGSFFQSKCEDAIRFIHSISNYSREMKLYIHKKDLYTNIHSSYYLLVIAKNCKQLPYPSSVWINKFGVFIQWNTTRQ

SEQ ID NO: 1721 - DNA, 2385 bp, Homo sapien
atggccgacttcgatgatcgtgtgtcggatgaggagaaggtacgcatagctgctaaattcatcactcatgcacccccaggggaatttaatgaagtattcaatgacgttcggctactacttaataatgacaatctcctcagggaaggggcagcacatgcatttgcccagtataacatggatcagttcacgcctgtgaagatagaaggatatgaagatcaggtcttaattacagagcacggtgacctgggtaatagcagatttttagatccaagaaacaaaatttcctttaaatttgaccacttacggaaagaagcaagtgacccccagccagaagaagcagatggaggtctgaagtcttggagagaatcctgtgacagtgctttaagagcctatgtgaaagaccattattccaacggcttctgtactgtttatgctaaaactatcgatgggcaacagactattattgcatgtattgaaagccaccagtttcagcctaaaaacttctggaatggtcgttggagatcagagtggaagttcaccatcacaccacctacagcccaggtggttggcgtgcttaagattcaggttcactattatgaagatggcaatgttcagttggttagtcataaagatgtacaggattcactaactgtttcgaatgaagcccaaactgccaaggagtttattaaaatcatagagaatgcagaaaatgagtatcagacagcaattagtgaaaactatcaaacaatgtcagataccacattcaaggccttgcgccgccagcttccagttacccgcaccaaaatcgactggaacaagatactcagctacaagattggcaaagaaatgcagaatgcttaaaggctgaatgtaggattcttcagtatgtggaaagacaaggattcaacgtgtggtcatatgataaataagtgatttataaacaagagtgatattttgctagggctttcaaagttaaccggttttctagcctcatggaatactgttgaacctatagcgttgtcttgattcttttgtgttctctgccttgtaattttctgttactgctatatctacgtgtaaatctttttttctttttttttttttttttttttcttttttggttaattctgccacatttaatgttggtgagagagtgatctatcctaatgacatttactgtttaaaaaagtttcctagccatgaagccctgctactgatttagacaaggtattatggtcattactttgtacccctatccttccaagcacttctggtacttcagtcgtttttactgatccaccaacacctaaagaggctatgctacagtctctagctaaatggaagacacattcatccttctccctctgactgctttgatcatcatttattgcatcgtcatatcatatttatcgcatctcataactaactttctaaagtttggattgggacttttcaggtcctttttggagggcaaaggaagttccagcttctctggggaacttgtttttaaatccaaagacttgaaccacattccctgcacatgaacatgtttgcttttatcccttctctcattggctccttcccatcttagtaccattgtagttatacatctgcattttttagaagcattttacccatttatttttttaaacattcaagaactgctgacgtactgtggatgtagagtataaaacttgaaaaatgcagatgttgaaggaataataggtatcttgtgctttaatactttatggcaggattgtactataagcaaatgaattaaacagctatgtaaatcataaagaaaaactaaaaatgaaccaaagtgaaaggataacttccaggcagtatctttctattgtaacctgttatttaaggaaatactagtgatttcttctaaataggatgtaaacttctttcaaattactcttcctcagtctgcctgccaagaactcaagtgtaactgtgataaaataacctttcccaggtatattcggcaggtatgtgtgtaatctcagaatacacaggtgacatagatatgatatgacaactggtaatggtggattcatttacattgtttacacttctatgaccaggccttaagggaaggtcagttttttaaaaaaccaagtagtgtcttcctacctatctccagatacatgtcaaaaagaaaaggtgtttgtgctccgttttgtttctgctcagtaatatagtcaagcaagtttgttccaggtgacccattgagctgtgtatgcatttttgtttatttcaataaaatatatttgtattatttgtccttcatactatccatccataccacactatcttctgtatcaggtagtctaatagaaatatacctgttttgttctaaaaaaaaaaaaaaaaaaa

SEQ ID NO: 1722 - protein, 286 aa, Homo sapien
MADFDDRVSDEEKVRIAAKFITHAPPGEFNEVFNDVRLLLNNDNLLREGAAHAFAQYNMDQFTPVKIEGYEDQVLITEHGDLGNSRFLDPRNKISFKFDHLRKEASDPQPEEADGGLKSWRESCDSALRAYVKDHYSNGFCTVYAKTIDGQQTIIACIESHQFQPKNFWNGRWRSEWKFTITPPTAQVVGVLKIQVHYYEDGNVQLVSHKDVQDSLTVSNEAQTAKEFIKIIENAENEYQTAISENYQTMSDTTFKALRRQLPVTRTKIDWNKILSYKIGKEMQNA

SEQ ID NO: 1723 - DNA, 1566 bp, Homo sapien
  Unsure 501: Unknown base
atcaacttataatattgaattaatgttaatagtgtcattttaggtgaactagacttcattgaaggaggtgggagccttatggagagagagtatatgattatctctatttgtatttaattaccatttcatctaaccattcagaacatatttcaagaataattttaattcaagttgtagataaaacttactataccattttcattttgacgctttccaagaatgagatacacggtattttaaagacaaagattgatcttacatgttactattaaaaaaaacacgataattttgttctacatttatacttttaatttttctgtggataataagaaatgccaagagtcgattgtgtccatgctggcaagtggcctaataaattgtccttttatttggtggtcctcagagtggcagttaacatcttgctattctgccttgtggacttgaggtggaaaggttcatggaattatatccttgcttttggatgtgcaaactgaggctcanagagtttaagacacatagtcactttcaccaattaaatgatgaagctgccatgtaaacgtatttcatcacactcccgagaccttcttctccagtagtgttttcaagctttttgagcatgcagacactaccatcaaaaaattatgtagagacatacttgagagttacagtttaaagaaaaacaaggtgtaattatttggttattagtagcatttacatatgcttgaaaacttctgctatatatacagtaagattaatttattctaacaatgatcttgataatccccctgattcccagactccttggaatagctccacagctatcagtggttctgccacaggttcagagccttcccagtactgccttcttatttgagaggtgtgctaagagctataaagcagaggcttcaattgtacacagtttggaagtttaggcaaaagtcatttcttccctatattttgtcatgcttatctcctgtctctttctgttttacagattagcaataaactccttaaaacccaaaggtttgggcttctgttcctttcacttgcagtcagacatggagttagtggagaagacgacagaaggggtaacctgcatggtgacagctactgaggggatggataggaaagcaggctgagtccctggggccagtggttaccaaagccaaggagagagcaaggggagcccagtgggcctggccatggactgctctggaattccgagtgtgaactttcagccaagaaggtagtgtgaaaatattactgtgaggttttaaaagtacacaaataacaattgttttttgtaaaaaaaaaaaaaaaaaaaaaaaaaaaaaaagagatatgccaaaaaaaaaaaaaaaaaaaaaaaaaaaattgtgtcttctgttaacatattaaaatttattcttttagatttttatgtgtctatatacatgtaaaatatatatgcatccccaaattgtattatactcttttgagacctcacatttttttcacccaagaatataacattaatttctttcctttagaaaagacatgagactaaagaatgtttattgagttgag

SEQ ID NO: 1724 - DNA, 2310 bp, Homo sapien
ggcacggatggagctcacagtctagtgagaggtcatgggcaataagtgcataagctaatttccagatggtgataaatgtggtgggggaaaaatacagggtactgctatagagaatgattgtaagtgagggtggggttattcttgattgggtggtgagtgtgtgggaggaatattttaagcagaaagaatggctcagccacaaaatggaaataagtttgaaatgttgaaggacagaaggccagtgtggctgaagcatttaggaagctattatatagtctaaaggagttggtggtttggtctagaatggtggtaattctgtgtgcgcgcgtgtctcccccgcaccaaccttttttgcacactcgaagctgaatattttcttttttagagaatttacccgcacctcctgcggggttcctaagcactctctctgctcccctccccccaactccctaccacagggccgctcccagtagttttattcttcgatcttgcccgggccgagcctggcaggggccggtggctcagcgggcctcgcacccggcgctccgccgccgccgccgcccagctgcgccggggcgccctccggagatgctgccgtggaagaagcacaagttcgagctgctggccgaggcgccgccgcggcaggcgtccaagcccaagggctacgctgtgagcctgcactactcggcgctcagctcgctggcgcgggcgtgccccgaaggcgcgcttagccgggtgggcagcatgttccgctccaagcgcaagaagctgcacatcactagcgaggacccaacttacaccgtgctctacctgggcaatgccaccaccatccaggcgcgcggcgacggctgcaccgaccttgctgtgggcaagatctggagcaagagcgaggcgggccgtcagggcaccaagatgaagctgacggtgagtgcgcagggtatccgcatggtgcacgccgaggagcgcgcgctgcgccgcccgggccacctctacctgctgcaccgcgtcacctactgcgtggccgacgcgcggctgcccaaggtcttcgcctgggtgtaccggcacgagctgaagcacaaggccgtgatgctgcgctgccacgccgtgctggtgtccaagcccgaaaaggcgcaggccatggccctgctgctctaccagacgtcggccaacgcgctggcggaatttaaacgcctcaagcggcgggacgacgcgcgtcaccagcagcaggagctggtgggcgcacacaccatcccgctagtgccgctgcgcaagctgctcctacacggaccctgctgctataaaccgccggtggagcgcagccgcaagcgcgcccaagcttggctccatcaccgaggacctgctcggcgaacagctggagcaggagctgcaggaggaagaggaagaggagcaacccgagggctgcccggaggaggaggagaaccgtgcggcagagggagatccagcagaggaggaggccgaggcgcagcgtgcgctagtggtcgccatgcactttgagtgcggggacttgttggatactctggagaatggccgtggggaggcgctaggaggcggcgggggctccctgggcccgggggccgggccgccgcctctgctgctgggcagcgcctccgacatgaaggttgagctgtcgcaacttattagcgacctgggcgagctcagcttcggcaacgacgtgcgcaccctgcaggccgacttgcgggtgacgcgcctgctgtcaggcgacagcacgggcagcgagagctccatcgagggcgggggccctgacgccacttccgccaccgccggggactcgtcccgccaggccgacggcgccagtgcagacgagccccactcgggctgagctcctccgcgcgtcgccggcgctccaccgtggctacccatccgtggtcccgacaacctccctgtcccttgcccgcccccaggaagggggaaatggggcatttggggcccagacctacacttggagcccaggtccagcgttcccccgaccgctttcccctacctcccggcccccgctcccgccccagcacttttggctctgttgcgcgtggggatgcggggagatttgagaggggaaaaccccgccaggagggagagagaggcacccctctgggatgcgggtgagggaaggttggctgaagttcctagtctcaggccgtaggtgcctggccagtttcctgtttgtggggcagctggggcctgaggaggaggggttcacttcctcctcccaccccctgggagcggccctgcgctgtcactgacatctcattaaaaaaaaaaaaaaaaaaa

SEQ ID NO: 1725 - protein, 308 aa, Homo sapien [sequence omitted]

SEQ ID NO: 1726 - DNA, 711 bp, Homo sapien
ggcacgtcggtgcctcagctcccggggtctctgggctccgcgctgcccacggggtgccgaggggcctctggagggggcgggttctctcgagccagaaagtccggagccgcccaggaattttggctcgaactgagtgcatttcctctcgggccggccgggtgcgatccgggaagggcggctgcgggcagacgcggcgctgcgctcggccaggccggcaccatgcggcccctgctctgcgcgctgaccggactggccctgctccgcgccgcgggctctttggccgctgccgaacccttcagccctccgcgaggagactcagctcagagcacagcgtgtgacagacacatggctgtgcaacgccgtctagatgtcatggaggagatggtagagaagaccgtggatcacctggggacagaggtgaaaggcctgctgggcctgctggaggagctggcctggaacctgcccccgggacccttcagccccgctcccgaccttctcggagatggcttctgagccctggagctggagcccagcagttggaggtggtgcacctgccaggcagcgcccacagaaccagccctgtcctctcgacttccttccttagcttcatgtgaaataaaagctattctggtctcctcaaaaaaaaaaaaaaaaaaaaaaaaaaaaaaaaaaaaaaaaaaaaaaaaaaaaaaaaaaaaaaaaaaaaaaaaa

SEQ ID NO: 1727 - protein, 97 aa, Homo sapien
MRPLLCALTGLALLRAAGSLAAAEPFSPPRGDSAQSTACDRHMAVQRRLDVMEEMVEKTVDHLGTEVKGLLGLLEELAWNLPPGPFSPAPDLLGDGF

SEQ ID NO: 1728 - DNA, 1098 bp, Homo sapien
  Unsure 283, 301, 349, 438: Unknown base
agaccctgtctcaaataataataataataataatcttattttggagaataaagagacctstggatttgaggtgccatttgggtagaaagaaaagacgtttacaccgagaaatagtctgtgttgccctgaaggagcagagggatgcatcgctggaggtgacctacagttgaagaagactcattatgacagaccttgtccttcttccttgtggaaagtgtttcctctgctgctactgctcatgagactcttccccctccctgtcccagggaaccaaagggctttnctaccacaccctttcttngccccccgcctcccatgtctgctgtgcctttgtactcagcaattcttngtttgctcccattatcttccagccggatacagagtgaatagttaaccacacttaggtcaaataggatctaaatttttgttcctgctccngtgtaaagaggccagtgtttgtgtgttgcaagcagccttggaatagtaactcttctcatttgtttgggatctggccamcaagttccagaatgatacacggatcagtgcagaagttcatcaggctctcggaccttagggctgttggagaaggcttcagcagcagaactgatggtkawkgytcgtgttctccatcctcaactttctttgcttcgatcatacacaagaatacatttggaagggcaaaaaatgaacactgttgttcattgcagccgtgttttgtgacacagatgcacagtctgctgtgaagaccttctctcaagtggsatytgggagtccatgccagatcatggtgcttcatgagagactgacagctatcaggggttgtggcacttagtgaggactctcctcccccagtgtgtgctgatgacacatacacacctgacaatagcttgagtcttctctgttccttttactctgtagccaacatacacatgatttaaaaccctttctaaatatctatcatggttcatccttgtccaaatgcagagtcagagctatttgtacttcattattatttccaaggcgaatagttggctttctttttgcaaaaataattaaagtttttgtatgttgcaaaaaaaaaaaaaaaaaactacgtag

SEQ ID NO: 1729 - protein, 69 aa, Homo sapien
  unsure 33, 39, 55: unknown amino acid
  Unsure 283, 301, 349, 438: Unknown amino acid
DRPCPSSLWKVFPLLLLLMRLFPLPVPGNQRAXLPHPFXAPRLPCLLCLCTQQFXVCSHYLPAGYRVNS

SEQ ID NO: 1730 - DNA, 3639 bp, Homo sapien
ctcgaggctccgcaccagccgcgcttctgtccgcctgcagggcattccagaaagatgaggatatttgctgtctttatattcatgacctactggcatttgctgaacgcatttactgtcacggttcccaaggacctatatgtggtagagtatggtagcaatatgacaattgaatgcaaattcccagtagaaaaacaattagacctggctgcactaattgtctattgggaaatggaggataagaacattattcaatttgtgcatggagaggaagacctgaaggttcagcatagtagctacagacagagggcccggctgttgaaggaccagctctccctgggaaatgctgcacttcagatcacagatgtgaaattgcaggatgcaggggtgtaccgctgcatgatcagctatggtggtgccgactacaagcgaattactgtgaaagtcaatgccccatacaacaaaatcaaccaaagaattttggttgtggatccagtcacctctgaacatgaactgacatgtcaggctgagggctaccccaaggccgaagtcatctggacaagcagtgaccatcaagtcctgagtggtaagaccaccaccaccaattccaagagagaggagaagcttttcaatgtgaccagcacactgagaatcaacacaacaactaatgagattttctactgcacttttaggagattagatcctgaggaaaaccatacagctgaattggtcatcccagaactacctctggcacatcctccaaatgaaaggactcacttggtaattctgggagccatcttattatgccttggtgtagcactgacattcatcttccgtttaagaaaagggagaatgatggatgtgaaaaaatgtggcatccaagatacaaactcaaagaagcaaagtgatacacatttggaggagacgtaatccagcattggaacttctgatcttcaagcagggattctcaacctgtggtttaggggttcatcggggctgagcgtgacaagaggaaggaatggacccgtgggatgcaggcaatgtgggacttaaaaggcccaagcactgaaaatggaacctggcgaaagcagaggaggagaatgaagaaagatggagtcaaacagggagcctggagggagaccttgatactttcaaatgcctgaggggctcatcgacgcctgtgacagggagaaaggatacttctgaacaaggagcctccaagcaaatcatccattgctcatcctaggaagacgggttgagaatccctaatttgagggtcagttcctgcagaagtgccctttgcctccactcaatgcctcaatttcttttctgcatgactgagagtctcagtgttggaacgggacagtatttatgtatgagtttttcctatttattttgagtctgtgaggtcttcttgtcatgtgagtgtggttgtgaatgatttcttttgaagatatattgtagtagatgttacaattttgtcgccaaactaaacttgctgcttaatgatttgctcacatctagtaaaacatggagtatttgtaaggtgcttggtctcctctataactacaagtatacattggaagcataaagatcaaaccgttggttgcataggatgtcacctttatttaacccattaatactctggttgacctaatcttattctcagacctcaagtgtctgtgcagtatctgttccatttaaatatcagctttacaattatgtggtagcctacacacataatctcatttcatcgctgtaaccaccctgttgtgataaccactattattttacccatcgtacagctgaggaagcaaacagattaagtaacttgcccaaaccagtaaatagcagacctcagactgccacccactgtccttttataatacaatttacagctatattttactttaagcaattcttttattcaaaaaccatttattaagtgcccttgcaatatcaatcgctgtgccagggcattgaatctacagatgtgaggcaagacaaagtacctgtcctcaaggagctcatagtataatgaggagattaacaagaaaatgtattattacaatttagtccagtgtcatagcataaggatgatgcgaggggaaaacccgagcagtgttgccaagaggaggaaataggccaatgtggtctgggacggttggatatacttaaacatcttaataatcagagtaattttcatttacaaagagaggtcggtacttaaaataaccctgaaaaataacactggaattccttttctagcattatatttattcctgatttgcctttgccatataatctaatgcttgtttatatagtgtctggtattgtttaacagttctgtcttttctatttaaatgccactaaattttaaattcatacctttccatgattcaaaattcaaaagatcccatgggagatggttggaaaatctccacttcatcctccaagccattcaagtttcctttccagaagcaactgctactgcctttcattcatatgttcttctaaagatagtctacatttggaaatgtatgttaaaagcacgtatttttaaaatttttttcctaaatagtaacacattgtatgtctgctgtgtactttgctatttttatttattttagtgtttcttatatagcagatggaatgaatttgaagttcccagggctgaggatccatgccttctttgtttctaagttatctttcccatagcttttcattatctttcatatgatccagtatatgttaaatatgtcctacatatacatttagacaaccaccatttgttaagtatttgctctaggacagagtttggatttgtttatgtttgctcaaaaggagacccatgggctctccagggtgcactgagtcaatctagtcctaaaaagcaatcttattattaactctgtatgacagaatcatgtctggaacttttgttttctgctttctgtcaagtataaacttcactttgatgctgtacttgcaaaatcacattttctttctggaaattccggcagtgtaccttgactgctagctaccctgtgccagaaaagcctcattcgttgtgcttgaacccttgaatgccaccagctgtcatcactacacagccctcctaagaggcttcctggaggtttcgagattcagatgccctgggagatcccagagtttcctttccctcttggccatattctggtgtcaatgacaaggagtaccttggctttgccacatgtcaaggctgaagaaacagtgtctccaacagagctccttgtgttatctgtttgtacatgtgcatttgtacagtaattggtgtgacagtgttctttgtgtgaattacaggcaagaattgtggctgagcaaggcacatagtctactcagtctattcctaagtcctaactcctccttgtggtgttggatttgtaaggcactttatcccttttgtctcatgtttcatcgtaaatggcataggcagagatgatacctaattctgcatttgattgtcactttttgtacctgcattaatttaataaaatattcttatttattttgttacttggtacaccagcatgtccattttcttgtttattttgtgtttaataaaatgttcagtttaacatcccagtggagaaagttaaaaaa

SEQ ID NO: 1731 - protein, 308 aa, Homo sapien
LEAPHQPRFCPPAGHSRKMRIFAVFIFMTYWHLLNAFTVTVPKDLYVVEYGSNMTIECKFPVEKQLDLAALIVYWEMEDKNIIQFVHGEEDLKVQHSSYRQRARLLKDQLSLGNAALQITDVKLQDAGVYRCMISYGGADYKRITVKVNAPYNKINQRILVVDPVTSEHELTCQAEGYPKAEVIWTSSDHQVLSGKTTTTNSKREEKLFNVTSTLRINTTTNEIFYCTFRRLDPEENHTAELVIPELPLAHPPNERTHLVILGAILLCLGVALTFIFRLRKGRMMDVKKCGIQDTNSKKQSDTHLEET

SEQ ID NO: 1732 - DNA, 17820 bp, Homo sapien
tgcccacttccccgccacctgaagcatctcgcctgtctccagccacctgaggagtcacccatgtcccctccacctgaagagtcacccatgtctccaccaccggaggcatctcgtctgttcccaccatttgaagagtctcctctgtcccctccacctgaggagtctcccctttccccaccacctgaggcatcacgcctgtccccaccacctgaggactcgcctatgtccccaccacctgaagaatcacctatgtcccccccacctgaggtatcgcgcctatcccccctgcctgtggtgtcacgcctgtctccaccgcctgaggaatctcccttgtccccaccgcctgaggagtctcccacgtcccctccacctgaggcttcacgcctctccccaccacctgaggactcccccacatccccaccacctgaggactcacctgcttccccaccaccggaggactcgctcatgtccctgccgctggaggagtcacccctgttgccactacctgaggagccgcaactctgcccccggtccgaggggccgcacctgtcaccccggcctgaggagccgcacctgtccccccggcctgaggagccacacctatctccgcaggctgaggagccacacctgtccccccagcctgaggagccatgcctatgcgctgtgcctgaggagccacacttgtccccccaggctgagggaccacatctgtcccctcagcctgaggaattgcacctgtccccccagactgaggagccgcacctgtctcctgtgcctgaggagccatgcttgtccccccaacctgaggaatcacacctgtccccccagtctgaggagccatgcctgtccccccggcctgaggaatcgcatctgtcccctgagcttgagaagccacccctgtcccctcggcctgaaaagccccctgaggagccaggccaatgccctgcacctgaggagctgcccttgttccctccccctggggaaccatccttatctcccttgcttggagagccagccctgtctgagcctggggaaccacctctgtcccctctgcccgaggagctgccgttgtccccatctggggagccatccttgtcgcctcagctgatgccaccagatccccttcctcctccactctcacccattatcacagctgcggccccaccggccctgtctcctttgggggagttagagtacccctttggtgccaaaggggacagtgaccctgagtcaccgttggctgcccccatcctggagacacccatcagccctccaccagaagctaactgcactgaccctgagcctgtcccccctatgatccttcccccatctccaggctccccagtggggccggcttctcccatcctgatggagccccttcctcctcagtgttcgccactccttcagcattccctggttccccaaaactcccctccttcccagtgctctcctcctgccctaccactgtccgttccctccccgttgagtcccatagggaaggtagtgggggtctcagatgaggctgagctgcacgagatggagactgagaaagtttcagaacctgaatgcccagccttggaacccagtgccaccagtcctctcccttccccaatgggggacctttcctgccccgcccccagccctgccccagccctggatgacttctctggcctaggggaagacacagcccctctggatgggattgatgctccgggttcacagccagagcctggacagacccctggcagtttggctagtgaacttaaaggctcccctgtgctcctggaccccgaggagctggcccctgtgacccctatggaggtctaccccgaatgcaagcagacagcagggcggggctcaccatgtgaagaacaggaagagccacgtgcaccggtggcccccacaccacccactctcatcaaatccgacatcgttaacgagatctctaatctgagccagggtgatgccagtgccagttttcctggctcagagcccctcctgggctctccagacccggaggggggtggctccctgtccatggagttgggggtctctacggatgttagtccagcccgagatgagggctccctacggctctgtactgactcactgccagagactgatgactcactattgtgcgatgctgggacagctatcagcggaggcaaagctgagggggagaaggggcggcggcgcagctccccagcccgttcccgcatcaaacagggtcgcagcagcagtttcccaggaagacgccggcctcgtggaggagcccatggagggcgtggtagaggacgggcccggctaaagtcaactgcttcttccattgagactctggtagttgctgacattgatagctctcccagtaaggaggaggaggaagaagatgatgacaccatgcagaataccgtggttctcttctccaacacagacaaatttgtcctaatgcaggacatgtgtgtggtatgtggcagctttggccggggggcagagggccacctccttgcctgttcgcagtgctctcagtgctatcacccttactgtgtcaacagcaagatcaccaaggtgatgctgctcaagggctggcgttgtgtggagtgtattgtgtgtgaggtgtgtggccaggcctccgacccctcacgcctgctgctctgtgatgactgtgatattagctaccacacatactgcctggaccccccactgctcaccgtccccaagggcggctggaagtgcaagtggtgtgtgtcctgtatgcagtgtggggctgcttcccctggcttccactgtgaatggcagaatagttacacacactgtgggccctgtgccagcctggtgacctgccctatctgtcatgctccttacgtagaagaggacctactaatccagtgccgccactgtgaacggtggatgcatgcaggctgtgagagcctcttcacagaggacgatgtggaccacgcacccgatgaaggctttgactgtgtctcctgccagccctacgtggtaaagcctgtggcgcctgttgcacctccagagctggtgcccatgaaggtgaaagagccagagccccagtactttcgcttcgaaggcgtgtggctgacagaaactggcatggccttgctgcgtaacctgaccatgtcaccactgcacaagcggcgccaacggcgaggacggcttggcctcccaggcgaggcaggattggagggttctgagccctcagatgcccttggccctgatgacaagaaggatggggacctggacaccgatgagctgctcaagggtgaaggtggtgtggagcacatggagtgcgaaattaaactggagggccccgtcagccctgatgtggagcctggcaaagaggagaccgaggaaagcaaaaaacgcaagcgtaaaccatatcggcctggcattggtggtttcatggtgcgacagcggaaatcccacacacgcacgaaaaaggggcctgctgcacaggcggaggtgttgagtggggatgggcagcccgacgaggtgatacctgctgacctgcctgcagagggcgccgtggagcagagcttagctgaaggggatgagaagaagaagcaacagcggcgagggcgcaagaggagcaaactggagggcatgttccctgcttacttgcaggaagccttctttgggaaggagctgctggacctgagccgtaaggccctttttgcagttggggtgggccggccaagctttggactagggaccccaaaagccaagggagatggaggctcagaaaggaaggaactccccacatcgcagaaaggagatgatggtccagatattgcagatgaagaatcccgtggcctcgagggcaaagccgatacaccaggacctgaggatgggggcgtgaaggcatccccagtgcccagtgaccctgagaagccaggcaccccaggtgaagggatgcttagctctgacttagacaggatttccacagaagaactgcccaagatggaatccaaggacctgcagcagctcttcaaggatgttctgggctctgaacgagaacagcatctgggttgtggaacccctggcctagaaggcagccgtacgccactgcagaggccctttcttcaaggtggactccctttgggcaatctgccctccagcagcccaatggactcctacccaggcctctgccagtccccgttcctggattctagggagcgcgggggcttctttagcccggaacccggtgagcccgacagcccctggacgggctcaggtggcaccacgccctccacccccacaacccccaccacggagggtgagggcgacggactctcctataaccagcggagtcttcagcgctgggagaaggatgaggagttgggccagctgtccaccatctcgcctgtgctctatgccaacattaattttcctaatctcaagcaagactacccagactggtcaagccgttgcaaacaaatcatgaagctctggagaaaggttccagcagctgacaaagccccctacctgcaaaaggccaaagataaccgggcagctcaccgcatcaacaaggtgcagaagcaggctgagagccagatcaacaagcagaccaaggtgggcgacatagcccgtaagactgaccgaccggccctacatctccgcattcccccgcagccaggggcactgggcagcccgccccccgctgctgcccccaccattttcattggcagccccactacccccgccggcttgtctacctctgcggacgggttcctgaagccgccggcgggctcggtgcctggccctgactcgcctggtgagctcttcctcaagctcccaccccaggtgcccgcccaagcgccttcgcaggacccctttggactggcccctgcctatcccctggagccccgcttccccacggcaccgcccacctatcccccctatcctagtcctacgggggcccctgcgcagcccccgatgctgggcgcctcatctcgtcctggggctggccagccaggggaattccacactaccccacctggcacccccagacaccagccctccacacctgacccgttcctcaaaccccgctgcccctcgctggataacttggctgtgcctgagagccctggggtagggggaggcaaagcttccgagcccctgctctcgcccccaccttttggggagtcccggaaggccctagaggtgaagaaggaagagcttggggcatcctctcctagctatgggcccccaaacctgggctttgttgactcaccctcctcaggcacccacctgggtggcctggagttaaagacacctgatgtcttcaaagcccccctgacccctcgggcatctcaggtagagccccagagcccgggcttgggcctaaggccccaggagccaccccctgcccaggctttggcaccttctcctccaagtcacccagacatctttcgccctggctcctacactgacccatatgctcagcccccattgactcctcggccccaacctccgccccctgagagctgctgtgctctgccccctcgctcactgccctccgaccctttctcccgagtgcctgtcagtcctcagtcccagtccagctcccagtctccactgacaccccggcctctgtctgctgaagctttttgcccatcacccgttacccctcgcttccagtcccctgacccttattctcgcccaccctcacgccctcagtcccgtgacccatttgccccattgcataagccaccccgaccccagccccctgaagttgcctttaaggctgggtctctagcccacacttcgctgggggctggggggttcccagcagccctgcccgcggggccagcaggtgagctccatgccaaggtcccaagtgggcagccccccaattttgtccggtcccctgggacgggtgcatttgtgggcaccccctctcccatgcgtttcactttccctcaggcagtaggggagccttccctaaagccccctgtccctcagcctggtctcccgccaccccatgggatcaacagccattttgggcccggccccaccttgggcaagcctcaaagcacaaactacacagtagccacagggaacttccacccatcgggcagccccctggggcccagcagcgggtccacaggggagagctatgggctgtccccactacgccctccgtcggttctgccaccacctgcacccgacggatccctcccctacctgtcccatggagcctcacagcgatcaggcatcacctctcctgtcgaaaagcgagaagacccagggactggaatgggtagctctttggcgacagctgaactcccaggtacccaggacccaggcatgtccggccttagccaaacagagctggagaagcaacggcagcgccagcggctacgagagctgctgattcggcagcagatccagcgcaacaccctgcggcaggagaaggaaacagctgcagcagctgcgggagcagtggggcctccaggcagctggggtgctgagcccagcagccctgcctttgagcagctgagtcgaggccagaccccctttgctgggacacaggacaagagcagccttgtggggttgcccccaagcaagctgagtggccccatcctggggccagggtccttccctagcgatgaccgactctcccggccacctccaccagccacgccttcctctatggatgtgaacagccggcaactggtaggaggctcccaagctttctatcagcgagcaccctatcctgggtccctgcccttacagcagcaacagcaacaactgtggcagcaacaacaggcaacagcagcaacctccatgcgatttgccatgtcagctcgctttccatcaactcctggacctgaacttggccgccaagccctaggttccccgttggcgggaatttccacccgtctgccaggccctggtgagccagtgcctggtccagctggtcctgcccagttcattgagctgcggcacaatgtacagaaaggactgggacctgggggcactccgtttcctggtcagggcccacctcagagaccccgtttttaccctgtaagtgaggacccccaccgactggctcctgaagggcttcggggcctggcggtatcaggtcttcccccacagaaaccctcagccccaccggcccctgaattgaacaacagtcttcatccaacaccccacaccaagggtcctaccctgccaactggtttggagctggtcaaccggcccccgtcgagcactgagcttggccgccccaatcctctggccctggaagctgggaagttgccctgtgaggatcccgagctggatgacgattttgatgcccacaaggccctagaggatgatgaagagcttgctcacctgggtctgggtgtggatgtggccaagggtgatgatgaacttggcaccttagaaaacctggagaccaatgacccccacttggatgacctgctcaatggagacgagtttgacctgctggcatatactgatcctgagctggacactggggacaagaaggatatcttcaatgagcacctgaggctggtagaatcggctaatgagaaggctgaacgggaggccctgctgcggggggtggagccaggacccttgggccctgaggagcgccctccccctgctgctgatgcctctgaaccccgcctggcatctgtgctccctgaggtgaagcccaaggtggaggagggtggacgccacccttctccttgccaattcaccattgctacccccaaggtagagcccgcactatgccaattcccttggcctggggctaaagccaggacagagcatgatgggcagccgggatacccggatgggcacagggccattttctagcagtgggcacacagctgagaaggcctcctttggggccacgggaggaccaccagctcacctgctgacccccagcccactgagtggcccaggaggatcctccctgctggaaaagtttgagctcgagagtggggctttgaccttgcctggtggacctgcagcatctggggatgagctagacaagatggagagctcactggtagccagcgagttacccctgctcattgaggacctgttggagcatgagaagaaggagctgcagaagaagcagcagctttcagcacagttgcagcctgcccagcagcagcagcaacagcagcagcagcattccctactgtctgcaccaggccctgcccaggccatgtctttgccacatgagggctcttctcccagtttggctgggtcccaacagcagctttccctgggtcttgcaggtgcccgacagccaggtttgccccagccactgatgcccacccagccaccagctcatgccctccagcaacgcctggctccatccatggctatggtgtccaatcaagggcatatgctaagtgggcagcatggagggcaggcaggcttggtaccccagcagagctcacagccagtgctatcacagaagcccatgggcaccatgccaccttccatgtgcatgaagccgcagcaattggcaatgcagcagcagctggcaaacagcttcttcccagatacagacctggacaaatttgctgcagaagatatcattggtcccattgcaaaggccaagatggtggctttgaaaggcatcaagaaagtgatggctcagggcagcattggggtggcacctggtatgaacagacagcaagtgtctctgctagcccagaggctctcggggggacctagcagtgatctgcagaaccatgtggcagctgggagtggccaggagcggagtgctggtgatccctcccagcctcgtcccaacccgcccacttttgctcagggagtgatcaatgaagctgaccagcggcagtatgaggagtggctgttccatacccagcagctcctacagatgcagctgaaggtgctagaggagcagattggtgtacaccgcaagtcccggaaggctctgtgtgccaagcagcgcactgccaaaaaagctggccgtgagttcccagaagctgatgctgagaagctcaagctggttacagagcagcagagcaagatccagaaacaactggatcaggtccggaaacagcagaaggagcacactaatctcatggcagaatatcggaacaagcagcagcaacaacagcagcagcagcagcaacaacagcaacagcactcagctgtgctggctctcagcccttcccagagtccccggctgctcaccaagctccctggtcagctgctccctggccatgggctgcagccaccacaggggcctccgggtgggcaagccggaggtcttcgcctgacccctgggggtatggcactacctggacagcctggtggccccttccttaatacagctctggcccaacagcagcaacagcaacattctggtggggctggatccctggctggcccttcagggggcttcttccctggcaaccttgctcttcgaagcctcggacctgattcaaggcttttacaggaaaggcagctgcagctgcagcagcaacgtatgcagctggcccagaaactgcagcagcagcagcagcagcaacagcagcagcagcaccttctaggacaggtggcaatccagcagcaacagcagcagggtcctggagtacagacaaaccaagctctgggtcccaagccccagggccttatgcctcccagcagccaccaaggcctcctggtccagcagctgtcccctcaaccaccccaggggccccagggcatgctgggccctgcccaggtggctgtgttgcagcagcagcaccctggagctttgggcccccagggccctcacagacaggtgcttatgacccagtcccgggtgctcagttccccccagctggcacagcagggtcagggccttatgggacacaggctggtcacagcccagcagcagcagcagcaacaacagcaccatacagcaagggtccatggcagggctgtcccatcttcagcagagtctgatgtcacacagtgggcagcccaaactgagcgctcagcccatgggctctttactagcagcttcagcaagcagcagcagctgcaacaagcaacagcaacatcagcaagcagcagcagcagcagctacaacagcacaagcaacttcagcagcatacagcttcaacagctagcatacagcagcagctagcttcaacaacagcagcagcaacagcttcaacagcagcaacagcagctacaacagcaacagcaacaacaacagcagcagtttcaacagcagcagcatacagcagcagatgggccttttaaaccagagtcgaactttactgtctcactcagcaacaacaagcagcagcaagtggcacttggccctggcatgccagcaaagcctcttcaacacttttctagccctggagccctgggtccaaccctcctcctgacgggcaaggaacaaaacaccgtagacccagccgtttcttcagaggccactgaggggccctctacacatcagggagggccgttagcaataggaactacccctgagtcaatggccactgaaccaggagaggtaaagccctcactctctggggactcacaactcctgcttgtccaaccccagccccagcctcagcccagctctctgcagctgcagccacctctgaggcttccaggacaacagcagcagcaagttagcctgctccacacagcaggtggaggaagccatgggcagctaggcagtggatcatcttctgaggcctcatctgtgccccacctgctggctcagccctctgtttccttaggggatcagcctgggtccatgacccagaaccttctgggcccccaacagcccatgctagagcggcccatgcaaaataatacagggccacaacctcccaaaccaggacctgtcctccagtctgggcagggtctgcctggggttggaatcatgcctacggtgggtcagcttcgagcacagctccaaggagtcctggccaaaaacccacagctgcggcacttaagtcctcagcagcagcagcaagcatacaggcactcctcatgcagcggcagctgcagcagagtcaggcagtacgccagaccccaccctaccaggagcctgggacccagacctctcccctccagggcctcctgggctgccaacctcaacttgggggcttccctggaccacagacaggccccctccaggagctaggggcagggcctcgacctcagggcccaccccggctccctgccccaccaggagccttatctacaggaccagtccttggccctgtccatcccacacctccaccatccagccctcaagagccaaagagaccttcacaattaccttcccccagctcccagcttcccactgaggcccagctccctcccacccatccagggacccccaaacctcaggggccaaccttggagccgcctcctgggagggtctcacctgctgctgcccagcttgcagataccttgtttagcaagggtctgggaccttgggatcccccagacaacctagcagaaacccagaagccagagcagagcagcctggtacctgggcatctggaccaggtgaatggacaggtggtgcctgaggcatcccaactcagcatcaagcaggaacctcgggaagagccatgtgccctgggagcccagtcagtgaagagggaggccaatggggagccaataggggcaccaggaaccagcaaccacctcctgctggcaggccctcgctcagaagctgggcatctgctcttgcagaagctactccgggcaaagaatgtgcaactcagcactgggcgggggtccgaggggctgcgagctgagatcaacgggcacattgacagcaagctggctgggctggagcagaaactacagggtacccccagcaacaaggaggatgcagcagcaaggaagcctttgacaccgaagcccaagcgggtacagaaggcaagcgacaggttggtgagctcccgaaagaagctgcggaaggaggacggggtcagggccagcgaggccttgctgaaacagctgaaacaggagctgtccctgctgcccctaacggagcctgctatcaccgccaattttagcctctttgccccctttggcagtggctgcccagtcaatgggcagagccagctgaggggggcctttggaagtggggcgctgcccactggccctgactactattcccagctgcttaccaagaataacctgagtaacccgccgacaccaccctcgtcgctgccccccaccccacccccatcggtgcagcagaagatggtgaatggcgtcaccccatctgaagagctgggggagcaccccaaggatgctgcctctgcccgggatagtgaaagggcactgagggatacttcagaggtgaagagtctagacctgctggctgccttgcctacaccccctcacaatcagactgaggatgtcaggatggagagtgatgaggatagcgattctcctgacagcattgtgccagcttcatcccctgagagcatcttgggggaggaggcccctcgtttccctcatctgggctcaggccggtgggagcaagaggaccgggccctctcccctgtcatccccctcattcctcgggccagcatcccagtcttcccagataccaaaccttatggggcccttggcctggaggtccctggaaagctgcctgtcacaacttgggaaaagggcaaaggaagtgaggtgtcagtcatgctcacagtctctgctgctgcagccaagaacctgaatggcgtgatggtggcagtggcggagctgctgagcatgaagatccccaactcctatgaggtgctgttcccagagagccccgcccgggcaggcactgagccaaagaagggggaagctgagggtcctggtgggaaggaaaagggtctggaaggcaagagcccagacactggccctgattggctgaagcagtttgatgcagtgttgcctggctataccctgaagagccaactagacatcttgagcctcctgaaacaggagagccccgccccagagccacccactcagcacagctatacctacaatgtctccaatctggatgtgcgacagctctcggccccacctcctgaagaaccctccccgcccccttcccccttggcaccttctcctgccagtccccctactgagcccttggttgaacttcccaccgaacccttggctgagccacccgtcccctcacctctgccactggcctcatcccctgaatcagcccgacccaagccccgtgcccggccccctgaagaaggtgaagattcccgtcctcctcgcctcaagaaatggaaaggagtgcgctggaagcggcttcggctgctgctgaccatccagaagggcagtgggcggcaggaggatgagcgggaagtggcagagtttatggagcagcttggcacagccttgcgacctgacaaggtaccgcgagacatgcgtcgctgctgtttctgtcatgaggagggtgacggggccactgatgggcctgcccgtctgctgaacctggacctggacctgtgggtgcacctcaactgtgccctttggtccacggaggtgtatgagacccagggcggggcactgatgaatgtggaggttgccctgcaccgaggactgctaaccaagtgctccctgtgccagcgaactggtgccaccagcagctgcaatcgcatgcgttgccccaatgtctaccattttgcttgtgccatccgtgccaagtgcatgttcttcaaggacaagaccatgctgtgtccaatgcataagatcaaggggccctgtgagcaagagctgagctcttttgctgtcttccggcgggtctacattgagcgggacgaggtgaagcaaatcgctagcatcattcagcggggagaacggctgcacatgttccgtgtggggggccttgtgttccacgccatcggacagctgctgcctcaccagatggctgactttcatagtgccactgccctctatcccgtgggctacgaggccacgcgcatctattggagcctccgcaccaacaatcgtcgctgctgctatcgctgttctattggtgagaacaacgggcggccggagtttgtaatcaaagtcatcgagcagggcctggaggacctggtcttcactgacgcctctccccaggccgtgtggaatcgcatcattgagcctgtggctgccatgagaaaagaggctgacatgctgcgactcttccctgagtatctgaagggcgaggagctctttgggctgacggtgcatgccgtgcttcgcatagctgaatcactgcccggggtggagagctgtcaaaactatttattccgctatgggcgccacccccttatggagctgccactcatgatcaaccccactggctgtgcccgatcagagcctaaaatcctcacacactacaaacggccccataccctgaacagcaccagcatgtctaaggcatatcagagcaccttcacaggcgagaccaacaccccctacagcaagcagtttgtgcactccaagtcatctcagtaccggcggctgcgcaccgaatggaagaacaacgtgtacctggctcgctcccgtatccagggcctggggctctatgcagccaaggacctagaaaagcacacaatggttatcgagtacattggcaccatcattcggaacgaggtggccaaccggcgggagaaaatctacgaagagcagaatcgaggcatctacatgttccgaataaacaatgaacatgtgattgatgctacgttgaccggcggccctgccaggtacattaaccattcctgtgcccctaactgtgtggccgaagtcgtgacatttgacaaagaggacaaaatcatcatcatctccagccggcgaatccccaaaggagaggagctaacctatgactatcagtttgattttgaggacgatcagcacaagatcccctgccactgtggagcctggaattgtcggaaatggatgaactaagaagctttgaggctaccaggcaggggagtccccctacccacaacctcttccctgaaagggatgagggggaagagaggtagcagccagagccaggacccagggttggggctgccggctgacccggagcccctggagcaggaggctggggcagagggccctaggccaagcccaccctgggcaccagggacaatcctcttccccaccaccggccctcaggctggcatctctgcccccagctccaggaggggccagacagaagcagccattgggcatctcaggtttgagggggatatgggccgggaactacccagaagcatctgggaggcagcagggtgggggaagaggatgtgtggccgggcctcacagccctgctgctcccactgacctctccggcccaactcacggctgcaaagagacttgactaagcttgacaatcccaaaggccgggtcccacacctggccctgcctgccgggtcctgcccccaccctcacccccatccccctccctcgttgatctgtctctgtttccctcgttcttccttctgtgtttctgtctctatgggttgtgtttccttgttttccactctgacaaatgcaacatgaacgggaaagaggcgcccagctgcctaggagggcaagctgggcaagcccgggcaaggagaccccgcacccacacctacctcatttaagtgttggattttttgctgttttgaaatgtgagaccctctccaagccccctactgccccaaccctctcccccacctcactgccctcttctgagtgggtggaaggggggtaggaggaggaagaaaaacaacaacaaaaaatccatctttgtttttaattatgggcatgggatggtggttgaggcaaatgatgatgaagattggggatgactggcccctagttgctctaggacttccttctccatctggacatgggggcaggagggagctaaacctaggaccaggatatctccctcctgttttcccaacctcatcatgagcctgtttgccctccagcccctggacgggttgggtggggggtagggtgagggctatccctgagtggcatgcccatacctagtgaggcagggtgtggcccggagctcccactttccctcagtcaccaaactgctgctggtctggtgggaaggggtggtgatgtgggggtgggggagcttagtgtcagcgcggggagggtggggggtatttatctatttatacatgggattgtacatagtcttgtggggcatgggggagccggctggaggtgagaaccctcccctctccccccaccccccggggagagcaaatgtaaaactactaatttttgtgctttatatattctatataaatatatctattttctttttacaaaaccagtttataaatggtaggggggtgtggggcggacacatggagctccccttgtgggggggccccctccattacccgacctaccgcccttttcctcaccccccaccccactccccaccccctggctgtgactgctgtaagatgggggtatagaggctgggcaattcccaccccctgttgtatagttggactatgttataacgcacaaaagagagctgaccccagggggagccagagggtgatgggttccttgcctccctttccttcccctttctgcccaagcttgtgctgcagttgaacctcttcctgggggtgggagtaggtaaggggtgggtgaggccccaaacccctctctggtagggaaccgtggggatgaagatgaagcttatatgcagttctcttctaggggctgtgggcaaagggcattttgtaattaatattttcaagaatcagatgtctggagtgtaggggtgggcttggtggtggtggacgggcgggcctgctggagggggagcttggtcgctgttgtgattttaggtttgtttttgttttgttttgaatttggggggttgtggattgttgggggtagggagattttttttttttaaagctgcttcctcaactgtttcaagctgcaaatgtttaagagaataacagcccccactcccacaggaaccgctgtaattaaatcagacagtaggaagactgggctgctgccctcaaagccacagcccttggatgttccttttccgagagcagaaggtctaggctacagggagggggagattggctcccgtgagtcaggctgtgtttggggcttgggccctgggattgggaaaaggggatggggcagactttgtaagcatatgctaggtatccgatagtcctgtagaatttagtgaagaaaccttatacagtttttaatttttatataaactataactcagacccaagctacaaggttggaattttggttggttttttttttaagtaccctgcctgtataattgcatcagaatcccccaccccaccccccgcccccgtgtttgtattttgggttggtttacactcgcacatactcagttttcagttttcccctttacagtcttctcccctcacctccaggaccctccccctttttaaaaaataaatcgctgacaagtgtgaatcccgtgaagactttattttgtgttgtgtgtatcctgtacagcaaggttggtccttcgtaacaacggatgaaatggttcccttttttaaagcgccctctctccctccaccctcagcgcccctgtccttggcatgttttgtatcagcgatcattctgaactgtacatatttatgttgcgagaggcaaagggcaagttttggattttgcttcttccaagtttgtttttaaacgacaaataaaaaaagaacattttaaatacaagcggctccgtcccatgaccctcgccgtcagccggatccgtgcggtccgcgaggacccgggggaggg

SEQ ID NO: 1733 - protein, 4981 aa, Homo sapien
  unsure 3381: unknown amino acid
CPLPRHLKHLACLQPPEESPMSPPPEESPMSPPPEASRLFPPFEESPLSPPPEESPLSPPPEASRLSPPPEDSPMSPPPEESPMSPPPEVSRLSPLPVVSRLSPPPEESPLSPPPEESPTSPPPEASRLSPPPEDSPTSPPPEDSPASPPPEDSLMSLPLEESPLLPLPEEPQLCPRSEGPHLSPRPEEPHLSPRPEEPHLSPQAEEPHLSPQPEEPCLCAVPEEPHLSPQAEGPHLSPQPEELHLSPQTEEPHLSPVPEEPCLSPQPEESHLSPQSEEPCLSPRPEESHLSPELEKPPLSPRPEKPPEEPGQCPAPEELPLFPPPGEPSLSPLLGEPALSEPGEPPLSPLPEELPLSPSGEPSLSPQLMPPDPLPPPLSPIITAAAPPALSPLGELEYPFGAKGDSDPESPLAAPILETPISPPPEANCTDPEPVPPMILPPSPGSPVGPASPILMEPLPPQCSPLLQHSLVPQNSPPSQCSPPALPLSVPSPLSPIGKVVGVSDEAELHEMETEKVSEPECPALEPSATSPLPSPMGDLSCPAPSPAPALDDFSGLGEDTAPLDGIDAPGSQPEPGQTPGSLASELKGSPVLLDPEELAPVTPMEVYPECKQTAGRGSPCEEQEEPRAPVAPTPPTLIKSDIVNEISNLSQGDASASFPGSEPLLGSPDPEGGGSLSMELGVSTDVSPARDEGSLRLCTDSLPETDDSLLCDAGTAISGGKAEGEKGRRRSSPARSRIKQGRSSSFPGRRRPRGGAHGGRGRGRARLKSTASSIETLVVADIDSSPSKEEEEEDDDTMQNTVVLFSNTDKFVLMQDMCVVCGSFGRGAEGHLLACSQCSQCYHPYCVNSKITKVMLLKGWRCVECIVCEVCGQASDPSRLLLCDDCDISYHTYCLDPPLLTVPKGGWKCKWCVSCMQCGAASPGFHCEWQNSYTHCGPCASLVTCPICHAPYVEEDLLIQCRHCERWMHAGCESLFTEDDVDHAPDEGFDCVSCQPYVVKPVAPVAPPELVPMKVKEPEPQYFRFEGVWLTETGMALLRNLTMSPLHKRRQRRGRLGLPGEAGLEGSEPSDALGPDDKKDGDLDTDELLKGEGGVEHMECEIKLEGPVSPDVEPGKEETEESKKRKRKPYRPGIGGFMVRQRKSHTRTKKGPAAQAEVLSGDGQPDEVIPADLPAEGAVEQSLAEGDEKKKQQRRGRKRSKLEGMFPAYLQEAFFGKELLDLSRKALFAVGVGRPSFGLGTPKAKGDGGSERKELPTSQKGDDGPDIADEESRGLEGKADTPGPEDGGVKASPVPSDPEKPGTPGEGMLSSDLDRISTEELPKMESKDLQQLFKDVLGSEREQHLGCGTPGLEGSRTPLQRPFLQGGLPLGNLPSSSPMDSYPGLCQSPFLDSRERGGFFSPEPGEPDSPWTGSGGTTPSTPTTPTTEGEGDGLSYNQRSLQRWEKDEELGQLSTISPVLYANINFPNLKQDYPDWSSRCKQIMKLWRKVPAADKAPYLQKAKDNRAAHRINKVQKQAESQINKQTKVGDIARKTDRPALHLRIPPQPGALGSPPPAAAPTIFIGSPTTPAGLSTSADGFLKPPAGSVPGPDSPGELFLKLPPQVPAQAPSQDPFGLAPAYPLEPRFPTAPPTYPPYPSPTGAPAQPPMLGASSRPGAGQPGEFHTTPPGTPRHQPSTPDPFLKPRCPSLDNLAVPESPGVGGGKASEPLLSPPPFGESRKALEVKKEELGASSPSYGPPNLGFVDSPSSGTHLGGLELKTPDVFKAPLTPRASQVEPQSPGLGLRPQEPPPAQALAPSPPSHPDIFRPGSYTDPYAQPPLTPRPQPPPPESCCALPPRSLPSDPFSRVPVSPQSQSSSQSPLTPRPLSAEAFCPSPVTPRFQSPDPYSRPPSRPQSRDPFAPLHKPPRPQPPEVAFKAGSLAHTSLGAGGFPAALPAGPAGELHAKVPSGQPPNFVRSPGTGAFVGTPSPMRFTFPQAVGEPSLKPPVPQPGLPPPHGINSHFGPGPTLGKPQSTNYTVATGNFHPSGSPLGPSSGSTGESYGLSPLRPPSVLPPPAPDGSLPYLSHGASQRSGITSPVEKREDPGTGMGSSLATAELPGTQDPGMSGLSQTELEKQRQRQRLRELLIRQQIQRNTLRQEKETAAAAAGAVGPPGSWGAEPSSPAFEQLSRGQTPFAGTQDKSSLVGLPPSKLSGPILGPGSFPSDDRLSRPPPPATPSSMDVNSRQLVGGSQAFYQRAPYPGSLPLQQQQQQLWQQQQATAATSMRFAMSARFPSTPGPELGRQALGSPLAGISTRLPGPGEPVPGPAGPAQFIELRHNVQKGLGPGGTPFPGQGPPQRPRFYPVSEDPHRLAPEGLRGLAVSGLPPQKPSAPPAPELNNSLHPTPHTKGPTLPTGLELVNRPPSSTELGRPNPLALEAGKLPCEDPELDDDFDAHKALEDDEELAHLGLGVDVAKGDDELGTLENLETNDPHLDDLLNGDEFDLLAYTDPELDTGDKKDIFNEHLRLVESANEKAEREALLRGVEPGPLGPEERPPPAADASEPRLASVLPEVKPKVEEGGRHPSPCQFTIATPKVEPALCQFPWPGAKARTEHDGQPGYPDGHRAIFSSGHTAEKASFGATGGPPAHLLTPSPLSGPGGSSLLEKFELESGALTLPGGPAASGDELDKMESSLVASELPLLIEDLLEHEKKELQKKQQLSAQLQPAQQQQQQQQQHSLLSAPGPAQAMSLPHEGSSPSLAGSQQQLSLGLAGARQPGLPQPLMPTQPPAHALQQRLAPSMAMVSNQGHMLSGQHGGQAGLVPQQSSQPVLSQKPMGTMPPSMCMKPQQLAMQQQLANSFFPDTDLDKFAAEDIIGPIAKAKMVALKGIKKVMAQGSIGVAPGMNRQQVSLLAQRLSGGPSSDLQNHVAAGSGQERSAGDPSQPRPNPPTFAQGVINEADQRQYEEWLFHTQQLLQMQLKVLEEQIGVHRKSRKALCAKQRTAKKAGREFPEADAEKLKLVTEQQSKIQKQLDQVRKQQKEHTNLMAEYRNKQQQQQQQQQQQQQQHSAVLALSPSQSPRLLTKLPGQLLPGHGLQPPQGPPGGQAGGLRLTPGGMALPGQPGGPFLNTALAQQQQQQHSGGAGSLAGPSGGFFPGNLALRSLGPDSRLLQERQLQLQQQRMQLAQKLQQQQQQQQQQQHLLGQVAIQQQQQQGPGVQTNQALGPKPQGLMPPSSHQGLLVQQLSPQPPQGPQGMLGPAQVAVLQQQHPGALGPQGPHRQVLMTQSRVLSSPQLAQQGQGLMGHRLVTAQQQQQQQQHHTARVHGRAVPSSAESDVTQWAAQTERSAHGLFTSSFSKQQQLQQATATSASSSSSSYNSTSNFSSIQLQQLAYSSSXLQQQQQQQLQQQQQQLQQQQQQQQQQFQQQQHTAADGPFKPESNFTVSLSNNKQQQVALGPGMPAKPLQHFSSPGALGPTLLLTGKEQNTVDPAVSSEATEGPSTHQGGPLAIGTTPESMATEPGEVKPSLSGDSQLLLVQPQPQPQPSSLQLQPPLRLPGQQQQQVSLLHTAGGGSHGQLGSGSSSEASSVPHLLAQPSVSLGDQPGSMTQNLLGPQQPMLERPMQNNYRATTSQTRTCPPVWAGSAWGWNHAYGGSASSTAPRSPGQKPTAAALKSSAAAASIQALLMQRQLQQSQAVRQTPPYQEPGTQTSPLQGLLGCQPQLGGFPGPQTGPLQELGAGPRPQGPPRLPAPPGALSTGPVLGPVHPTPPPSSPQEPKRPSQLPSPSSQLPTEAQLPPTHPGTPKPQGPTLEPPPGRVSPAAAQLADTLFSKGLGPWDPPDNLAETQKPEQSSLVPGHLDQVNGQVVPEASQLSIKQEPREEPCALGAQSVKREANGEPIGAPGTSNHLLLAGPRSEAGHLLLQKLLRAKNVQLSTGRGSEGLRAEINGHIDSKLAGLEQKLQGTPSNKEDAAARKPLTPKPKRVQKASDRLVSSRKKLRKEDGVRASEALLKQLKQELSLLPLTEPAITANFSLFAPFGSGCPVNGQSQLRGAFGSGALPTGPDYYSQLLTKNNLSNPPTPPSSLPPTPPPSVQQKMVNGVTPSEELGEHPKDAASARDSERALRDTSEVKSLDLLAALPTPPHNQTEDVRMESDEDSDSPDSIVPASSPESILGEEAPRFPHLGSGRWEQEDRALSPVIPLIPRASIPVFPDTKPYGALGLEVPGKLPVTTWEKGKGSEVSVMLTVSAAAAKNLNGVMVAVAELLSMKIPNSYEVLFPESPARAGTEPKKGEAEGPGGKEKGLEGKSPDTGPDWLKQFDAVLPGYTLKSQLDILSLLKQESPAPEPPTQHSYTYNVSNLDVRQLSAPPPEEPSPPPSPLAPSPASPPTEPLVELPTEPLAEPPVPSPLPLASSPESARPKPRARPPEEGEDSRPPRLKKWKGVRWKRLRLLLTIQKGSGRQEDEREVAEFMEQLGTALRPDKVPRDMRRCCFCHEEGDGATDGPARLLNLDLDLWVHLNCALWSTEVYETQGGALMNVEVALHRGLLTKCSLCQRTGATSSCNRMRCPNVYHFACAIRAKCMFFKDKTMLCPMHKIKGPCEQELSSFAVFRRVYIERDEVKQIASIIQRGERLHMFRVGGLVFHAIGQLLPHQMADFHSATALYPVGYEATRIYWSLRTNNRRCCYRCSIGENNGRPEFVIKVIEQGLEDLVFTDASPQAVWNRIIEPVAAMRKEADMLRLFPEYLKGEELFGLTVHAVLRIAESLPGVESCQNYLFRYGRHPLMELPLMINPTGCARSEPKILTHYKRPHTLNSTSMSKAYQSTFTGETNTPYSKQFVHSKSSQYRRLRTEWKNNVYLARSRIQGLGLYAAKDLEKHTMVIEYIGTIIRNEVANRREKIYEEQNRGIYMFRINNEHVIDATLTGGPARYINHSCAPNCVAEVVTFDKEDKIIIISSRRIPKGEELTYDYQFDFEDDQHKIPCHCGAWNCRKWMN

SEQ ID NO: 1734 - DNA, 2947 bp, Homo sapien
acagatatatttaagacagagaagcctctctcaggagccagatgatctgaagatgatgctaatccccaaatacgaagttcctccagctaactctcctctgagctccctcttcttagctttgggattggggatggtctcatccttgccaggaatccctttgttgctcccagtgtctctgatgagcttctcctccctcccagagacaatgcaggggtggttttcagcagaatgtgccacctgcacttctgattgttctgagacccagcccagaggggtggagaaggcgcacaaaccctattccaataaactgcctgcagagaaccacagcctgctaatagtcgttgaggtctcagccccctaaggtctccaagctcatttgaccagcgcagctgcgacttcggctgtctgcctctggcaggtgccaatatcagcatcttgtcccactgccatggggagttaatttttgctccagggcagctgccaagcccagcaccggcatcaatagaaggttttctctgattttcttctcttcctctcaggctaggctttcttaccaatccccaattttcttctgtagggcgccaggagactggccagagatctttagactcttacttagtttgaacatctcttgctgctcacacccaggcttcttcagcagaaagcatgacccatagtaggtactcagaaactggttgaatgaaaagccttgacatttaagggctttattctgtcatacggtagcaagaactggcctattggcatcgtattcctggcattgagctgtattgaccctgaatgtgtcctcctgaggtttttgagggtgacctaggagaaagggtctgaaaaagcattgggatccaagtgactttaaatctgcccgtggcatttcctgctgagaggcgagaaactagcatctctcccaacaggctcacatccgccaggaaggacagagcccaaaacgggggtagactttgtgggaaattcgccagttagtccgctgagattttaatctgcctcaagcacaggatgctgacaagaaaggtagaccactcccccgatcccagacaaaccccaggggtgacaacttctccatcagtatcctgagaagcaacatcaaatgcttaccaagtcagcacgtttactgagtgagtactctgacggaataaaccagcatttggagctgaacttgagaacacagggccctctgacagcagcttagggaaacacccatcccttccagattggcagaatccttccatttcatgtccttcggagacgctgtattctctttacaaatcattcatgaaactgagactcagtctcccaggggtaagtcctgggccacgtgcaaacaatggcaaatccagctcttccatgatagagaaggcaaacacacccaccttcatcctgagcctaaaaggccacctctgagcacttgggcagccactcctctgggcctcagagggccatgagcttggccaggtaggcacagcggcggggaagtcacagctgtcaggtaccggccatggtgcaggtgggaataggagatgccagagctgctttagctgaggaaagcaaacagtcagcagtgctcaaaggagcaaaacttcgaatgtgcacattgacccctgacacctgcaagcataacacagatcctaagactagagtgaagtaggaagaagaattagaaaatccagtggatgtcctgagtatagggaaccagggccgttgaaaatcagtaaaggttgattacctggggcgagaccgggtgactgtggcagtgcaggtgaaggtaccctggaccttctcagttcgctggcacataaggctccgccaataaagcgtggttctctctgtcatacacacccagagtttgtgaatcagcctgattggagggctatatgatccagcattagcttcctggtgtgccaagcatgcttgatcgggtatttttttatattattattattttttacctgtagctgaaggcatttctcggatgtggagaggagaatggaaatcgcagaaccaaatcagtttgccctgccatatttggctgtggtctgtcattgggcatttctgatgtgcttttctggattcaggaagagctgattgtcctccgagggttgaaaaaaaaaaaaacagtttcagaaacctgaatccagggccttatagttctcctcattatctatcttcttctcccttccctcgcccaagggagtgggggaaacacttttcactgcagagtttgctttaaagttttcccatcttgcgtgcattatcccttgatattaaaattattttctcagtttaatccaactcctgctgagaagctgtgtgagatttaggctgtggggtttttttcttgtactcttttggatggtgttgcatttttcactcttaacccgagggtgtgtttcagcttatgttcgttctgtttcatgcaggtttatagcacggtagagtagaaggcggcttctgatttttagggtatttttagaattcattcctgagtgaggggttcagacacccagtctcctcggaacaggggtgaggggtcgactgagctttgttgagaagcctccagttaggcttcgggcgggtctccatgttatattgtgtgtttactgagcttcccactggtagaagatgacacatttgtccatcgtcctgtgtatctgctttccagaggacaccggagcattctcctggggtcactcccacatggctgcctcacatagctgttttgcaacagcctttattgccaacacccttggaagaacatctcctgtagaagtacaagttttgcaatatggactttggaagtggttttgtgatgttcgaattttctgttagcctattgctcaagcactacagaatgtacatagtccctttggccatcctctcaccccagaatatcctaataaacattgttttctttttt

SEQ ID NO: 1735 - protein, 119 aa, Homo sapien [sequence omitted]

SEQ ID NO: 1736 - DNA, 1809 bp, Homo sapien
cccacgcgtccggccacctgcgtgtattttgtgctctggctgccctcatctagcccatcgtgggtcagcaccctcatcaagtgcctgcctatcttctgcctctggctcttccttctggcccatggcctgggattcctgctggcccaccccagcgccacccgcatctttgtggggcttgtcttctctgctgtaggtgacgccttcctcatctggcaggaccaaggatacttcgtgcatggtctgctgatgtttgctgtgacccacatgttctacgcctcggcctttggcatgcagccactggctcttcggacaggtctggtgatggcagcgctgtcgggcctgtgctatgccctcctctacccatgcctctcaggtgccttcacctacctggtgggggtctatgtggcccttatcggcttcatgggctggcgagctatggcagggctgcggctggccggggcagactggcgctggacagagctggcagctggcagtggtgcactcttctttatcatctcagacctgaccatcgccctcaacaaattctgttttcctgtgccctactctcgggcgcttatcatgtccacctactatgtggcccagatgctcgtcgccttgtcagctgtcgaaagccgggagcctgtggaacactacagactgaccaaggccaactgaggtgccagggtctggtcacccctctctcctcctggggctggggcccagatcctggggacctgcaggagctggatcaggatggctgcagtgccagcctggggcagcaggtactgcctgaggaatttgcaagttcgtgtggggaggctggaaaaggatctccctagcagaactcgtggttcaggacaatgctgagagctaaaagagccagcctaatatcagactggagccagaagtagacatctccccacctctaccctatcaggactttcaaaacccccctggaaggtgatggtgctcagcttcttgacacccccccacccacttcccctaccaggtggaagagtctgactccatgtgttatgcctaggaccaatggcagtgctgggttcacccactcctcccctttttcatctgcacaaagttgagggaaacgggagaatctgtgctgagaagactcagacccaggagcccctttcacaggcccctagttgggaagactggatgagagtggagcctccgtttcttttccctcttctatccttgttacttgaacaatctcagtctctaagtggtgggtggggacatgaagaggtgtgggtccaggttaggcaggagagagaacttctttggtctcggagtttggggtctcaagaattcaagtagccccatctctctctcgggcaagcccaaagctcaggtcccatacgctacccttagatcctatccccagggctagggtgaaccatgccaaaggaaggggccagcttctctgtgtgtgtgtgtagcctgtctcctagtctgcctatgtctttctctgctatatgtttctgtcctgctgtctgtcaaaagtctcacagagagagggcctcagggagctgctgaggggtgctgagcctggctcagggagctgggacccctcccctccaacacacatactcacagtgctttcctccttgtccctcctacactaggagcaagaggagggggctccaatgacactctggggttttaagacccaaggcacattcaatgcaaggggagcaaggatgggacaactccatcttctgctgcccatgtgaaaaataataaaaatcaagagccattggcaaaaaaaaaaaaaaaaaaaaaaaaaaa

SEQ ID NO: 1737 - DNA, 1184 bp, Homo sapien
  Unsure 750-778: Unknown base
aaaaataaatacataaaatacagcgtccaaaagtgtgtcatcttctttctcttcacaattttataataagggggtaaaatgcctgtgagtctattcattatggaaaataaaaaagaaacaaccatttaaggctgaggcattttggttttctgctggcttttagattattaactgcattaagcccctcactacaacttcaccagtatcctagaaacaatttgggtttccttttaggcagggacaggaagtattcaaaggacagacatatggacagagttaggcccttcagggttgaagtctgtggtttcttgtgtctcaagactcaatgtcttgagaagttggtggaccctgtcctccatccaagaagtgctgccaaggaaaccaggggacctagcaaagagtcaggagaaaatggccaaaggaattctgacattccatacctgaatgaactgttttcgtgagtgctttgatcaccctatcccctatcaaggcgctgaacaggtggcccgcaggaaatctgctgtcgcaagaggagggctttgacttacttcccctaattgttgagtaaaaagtgattctcttaatttctgtattctgtttttcatatcaccagtagaagggtcctgtggatctaaatagagcacattttaaggctacagagtagtagaaattgatgtttagacaaggcagcttgttcaaaatctgaaaggcacacccagaagctttctctaaacattttggctcccattnnnnnnnnnnnnnnnnnnnnnnnnnnnnncaaaaacaaaaaacaagacccaagtctggagaagttggagtacatttacatgggtatcaaaaatttagcatctgcgagccaaaagccacaccggtgctactcaaaagctggagaaagtacttgtttgtaacacagcaactatggcgatgggtccttttcttatttaaaggctttctcaggtaagtttcaatagctgggagggatacattttgggaaaaaatctcaatatgaaagaaagaaaacttcagtggttggaaatactttaatacctccggtgacatctgaatctcgggctcaggatcagaacttaggatcacggtctctgggtgggccataaaatatttacaatctagttaaaggccagtggttttaaaaataaagtctgggggcccctggtaaaagattc

SEQ ID NO: 1738 - protein, 21 aa, Homo sapien
  Unsure 750-778: Unknown amino acid
KNKYIKYSVQKCVIFFLFTIL

SEQ ID NO: 1739 - DNA, 1508 bp, Homo sapien
cgctaagcgtcccagccgcatccctcccgcagcgacggcggcccgggacccgcgggctgtgaaccatgaacacccgcaatagagtggtgaactccgggctcggcgcctcccctgcctcccgcccgacccgggatccccaggacccttctgggcggcaaggggagctgagccccgtggaagaccagagagagggtttggaggcagcccctaagggcccttcgcgggagagcgtcgtgcacgcgggccagaggcgcacaagtgcatacaccttgatagcaccaaatataaaccggagaaatgagatacaaagaattgcggagcaggagctggccaacctggagaagtggaaggagcagaacagagctaaaccggttcacctggtgcccagacggctaggtggaagccagtcagaaactgaagtcagacagaaacaacaactccagctgatgcaatctaaatacaagcaaaagctaaaaagagaagaatctgtaagaatcaagaaggaagctgaagaagctgaactccaaaaaatgaaggcaattcagagagagaagagcaataaactggaggagaaaaaaagacttcaagaaaaccttagaagagaagcatttagagagcatcagcaatacaaaaccgctgagttcttgagcaaactgaacacagaatcgccagacagaagtgcctgtcaaagtgctgtttgtggcccacaatcctcaacatgggccagaagctgggcttacagagattctctaaaggcagaagaaaacagaaaattgcaaaagatgaaggatgaacaacatcaaaagagtgaattactggaactgaaacggcagcagcaagagcaagaaagagccaaaatccaccagactgaacacaggagggtaaataatgcttttctggaccgactccaaggcaaaagtcaaccaggtggcctcgagcaatctggaggctgttggaatatgaatagcggtaacagctggggtatatgagaaaatattgactcctatctggccttcatcaactgacctcgaaaagcctcatgagatgctttttcttaatgtgattttgttcagcctcactgtttttaccttaatttcaactgcccacacacttgaccgtgcagtcaggagtgactggcttctccttgtcctcatttatgcatgtttggaggagctgattcctgaactcatatttaaactctactgccagggaaatgctacattatttttctaattggaagtataattagagtgatgttggtagggtagaaaaagagggagtcacttgatgctttcaggttaatcagagctatgggtgctacaggcttgtctttctaagtgacatattcttatctaattctcagatcaggttttgaaagctttgggggtctttttagattttaatccctactttctttatggtacaaatatgtacaaaagaaaaaggtcttatattcttttacacaaatttataaataaattttgaactccttctgtaaaaaaaaaaaa

SEQ ID NO: 1740 - protein, 307 aa, Homo sapien
MNTRNRVVNSGLGASPASRPTRDPQDPSGRQGELSPVEDQREGLEAAPKGPSRESVVHAGQRRTSAYTLIAPNINRRNEIQRIAEQELANLEKWKEQNRAKPVHLVPRRLGGSQSETEVRQKQQLQLMQSKYKQKLKREESVRIKKEAEEAELQKMKAIQREKSNKLEEKKRLQENLRREAFREHQQYKTAEFLSKLNTESPDRSACQSAVCGPQSSTWARSWAYRDSLKAEENRKLQKMKDEQHQKSELLELKRQQQEQERAKIHQTEHRRVNNAFLDRLQGKSQPGGLEQSGGCWNMNSGNSWGI

SEQ ID NO: 1741 - DNA, 7540 bp, Homo sapien
tgcggccgcggcgcggagcagccgacgcacgctagtgggtccgcccgccaccgccccttcctcggcgtccgctcccgcccttgccgtcccccgcgcggctccgcgcctcgggccccgggcgcagccagccctccagacgcccgcggtcccggcggcgtgtgctgctcttcctccgcccgcggtttccagcgccgctccttcccccgcttgggcagggagggggcattgatcttcgatcgcgaagatggctgctggctgcctgctggccttgactctgacacttttccaatctttgctcatcggcccctcgtcggaggagccgttcccttcggccgtcactatcaaatcatgggtggataagatgcaagaagaccttgtcacactggcaaaaacagcaagtggagtcaatcagcttgttgatatttatgagaaatatcaagatttgtatactgtggaaccaaataatgcacgccagctggtagaaattgcagccagggatattgagaaacttctgagcaacagatctaaagccctggtgagcctggcattggaagcggagaaagttcaagcagctcaccagtggagagaagattttgcaagcaatgaagttgtctactacaatgcaaaggatgatctcgatcctgagaaaaatgacagtgagccaggcagccagaggataaaacctgttttcattgaagatgctaattttggacgacaaatatcttatcagcacgcagcagtccatattcctactgacatctatgagggctcaacaattgtgttaaatgaactcaactggacaagtgccttagatgaagttttcaaaaagaatcgcgaggaagacccttcattattgtggcaggtttttggcagtgccactggcctagctcgatattatccagcttcaccatgggttgataatagtagaactccaaataagattgacctttatgatgtacgcagaagaccatggtacatccaaggagctgcatctcctaaagacatgcttattctggtggatgtgagtggaagtgttagtggattgacacttaaactgatccgaacatctgtctccgaaatgttagaaaccctctcagatgatgatttcgtgaatgtagcttcatttaacagcaatgctcaggatgtaagctgttttcagcaccttgtccaagcaaatgtaagaaataaaaaagtgttgaaagacgcggtgaataatatcacagccaaaggaattacagattataagaagggctttagttttgcttttgaacagctgcttaattataatgtttccagagcaaactgcaataagattattatgctattcacggatggaggagaagagagagcccaggagatatttaacaaatacaataaagataaaaaagtacgtgtattcacgttttcagttggtcaacacaattatgacagaggacctattcagtggatggcctgtgaaaacaaaggttattattatgaaattccttccattggtgcaataagaatcaatactcaggaatatttggatgttttgggaagaccaatggttttagcaggagacaaagctaagcaagtccaatggacaaatgtgtacctggatgcattggaactgggacttgtcattactggaactcttccggtcttcaacataaccggccaatttgaaaataagacaaacttaaagaaccagctgattcttggtgtgatgggagtagatgtgtctttggaagatattaaaagactgacaccacgttttacactgtgccccaatgggtattactttgcaatcgatcctaatggttatgttttattacatccaaatcttcagccaaagaaccccaaatctcaggagccagtaacattggatttccttgatgcagagttagagaatgatattaaagtggagattcgaaataagatgattgatggggaaagtggagaaaaaacattcagaactctggttaaatctcaagatgagagatatattgacaaaggaaacaggacatacacatggacacctgtcaatggcacagattacagtttggccttggtattaccaacctacagtttttactatataaaagccaaactagaagagacaataactcaggccagatcaaaaaagggcaaaatgaaggattcggaaaccctgaagccagataattttgaagaatctggctatacattcatagcaccaagagattactgcaatgacctgaaaatatcggataataacactgaatttcttttaaatttcaacgagtttattgatagaaaaactccaaacaacccatcatgtaacgcggatttgattaatagagtcttgcttgatgcaggctttacaaatgaacttgtccaaaattactggagtaagcagaaaaatatcaagggagtgaaagcacgatttgttgtgactgatggtgggattaccagagtttatcccaaagaggctggagaaaattggcaagaaaaccagagacatatgaggacagcttctataaaaggagcctagataatgataactatgttttcactgctccctactttaacaaaagtggacctggtgcctatgaatcgggcattatggtaagcaaagctgtagaaatatatattcaagggaaacttcttaaacctgcagttgttggaattaaaattgatgtaaattcctggatagagaatttcaccaaaacctcaatcagagatccgtgtgctggtccagtttgtgactgcaaaagaaacagtgacgtaatggattgtgtgattctggatgatggtgggtttcttctgatggcaaatcatgatgattatactaatcagattggaagattttttggagagattgatcccagcttgatgagacacctggttaatatatcagtttatgcttttaacaaatcttatgattatcagtcagtatgtgagcccggtgctgcaccaaaacaaggagcaggacatcgctcagcatatgtgccatcagtagcagacatattacaaattggctggtgggccactgctgctgcctggtctattctacagcagtttctcttgagtttgacctttccacgactccttgaggcagttgagatggaggatgatgacttcacggcctccctgtccaagcagagctgcattactgaacaaacccagtatttcttcgataacgacagtaaatcattcagtggtgtattagactgtggaaactgttccagaatctttcatggagaaaagcttatgaacaccaacttaatattcataatggttgagagcaaagggacatgtccatgtgacacacgactgctcatacaagcggagcagacttctgacggtccaaatccttgtgacatggttaagcaacctagataccgaaaagggcctgatgtctgctttgataacaatgtcttggaggattatactgactgtggtggtgtttctggattaaatccctccctgtggtatatcattggaatccagtttctactactttggctggtatctggcagcacacaccgcctgttatgaccttctaaaaaccaaatctgcatagttaaactccagaccctgccaaaacatgagccctgccctcaattacagtaacgtagggtcagctataaaatcagacaaacattagctgggcctgttccatggcataacactaaggcgcagactcctaaggcacccactggctgcatgtcagggtgtcagatccttaaacgtgtgtgaatgctgcatcatctatgtgtaacatcaaagcaaaatcctatacgtgtcctctattggaaaatttgggagtttgttgttgcattgttggtgattacatgtgaaagggttccccatacaattgttaatgaaccataagaaatgtcttgatattgacctggaattttgacttgctgcaattttactaagaaaatctctaaggggaaagaaattatttttgccttcactttttcttctgtgaaaagttaattcctgctttaagtagcaattattgaaatatatagagaaagagagaattaacattggtctaaattgttgaaatataaataatggctaattttctatgaaaaatttgccatgaataaaatgccttatgaagaacggcttctttgccaaaaataaaacacaattgatgaccaattcaattttgatggggtaatgaattgatggtttgaaaatagtaactaagaaattattaaactaaaggtgcttgagggagaaattagaatatgtgacatatttcctcataaatgtaagcaagcccttaataaatgctttgatgtaatgttccttttgttcacagtacagttatgtagtgctagccagatatttaaaaatgctctaagaaaagcttgtcaggggggagggggaaatgtttttcttgtgataaatgaactttggtttaccaagggtattttgcatgatgctgctgctattttaacttttcagttgttttttctcttactgtagagtgtagtcattgaaaagttaactgagtgatattgttatgtaagaatctgaaccttgcagtgtaaatgcacttaagtcatctttaaaatgttgttaaactactctgaatatactgtgcaatgtaaatgctgaatgattggggttagataaatggtgaaatgagaattaatgaattttatacagattcatgctttcgcctgataacctatgtacagatattttaagtacataaatcagatttgacacatttattttttgaaaagtacatatatgttctcaatgaagattcatcctaggtttcctctttgttcgtttcaatagtagcacatacaatccaaaagttcctgctactgctgcttttgcccttccattttaaatggtatgatcgtttggccaaaatttccatgcaagttgataagggttttacaataatctgaacaaataggaaaccttgaatctctatgtatgcacatgaatacttgattgtgaataataaaagttgttttttatacagcctcattggtgaaaatggttagtgtagtaaatcagatatttcattatagactaatatggtagcagattatttatgcttttaaaaattattttctggagcaaacagtatttgaagaaaaggtaaaaactatgaatgtgtaattctaagaatagttaataattttactgaaggctgaacgtatgtagatattttttatgataaaatgcagtttttctttttttggaacatgccaattactggtatgtgtatatgctggaaattttcttacatatcctttttaagtcaaagttattaacattatccagcatgctttaatatgctccacatatcaaagatataaccaataatttaacgtagcttaaaagataacatttgttttgtttttagctttgcatacatttgtaattccctcccaccaccaatataccttaggtaccatttgtgtacatttcaagattttttttttcaataaaaaggtggggggaaatggaatcactttgccaactattgttctaagagttgacatcagttaccatttctaatgcattgttgtgattttgtagtgtcattcataactggtattgacattttagaaaacaccaaagtgatttaaaatatatgtggggaaaaaaacttctcactctagtaacaatgttttaatcatgttgtttgttaaatatttaaaagttattgttcaatttttgctagactatcttaaatcatgatagtgttgggaagggggtatcaaaatataaaattgttagtttgtgtatataaacaatgcacattaaaacaattgaattgcttccagcatacaacaaactaccttaaaattatgttcaaaatctattaaatatattttcatggctaatgtcgagtatatgttttcatcaattacattgttattgtattaatcgcggttaaacttggcatctcttggcaggatcctatttaatttctgttgccatcaaaatatatttatatgcatgagttttgctataaacctttattttctgctataaagttatatattatgacaaccataaatgcaattacaaattgggtaagaacaagctgaataaaagttgttcccatgactaatattagtcttcatgcttttagcatattttttaagacagtaacactcatcccatcaaattattacattacatttagtatttttctgagttacattgacaagaacttaaattatagcctgttattaatattgatttccaacgactgaacagtacaacagatcaataaaaaagtttatacactgctttaactaatttttgttatactcatgtggcttagtgtagttagtcactaaaacagagttcaagtgagcttggcaatggtgttgagtaacaagaaagaattttgcattaatgatttctttttattttcctcatttaaacaaccagcattactgccaaacaccaaccgtggtccatatttgtaacaggtttttaacatgacatagttagcaagtttgattgaagagatttttaggtcctgggcctataagattttagtatgatcttttttcatgtttctaatgcttgaggtgttactgcttaacttgggaaaaaaaaaaacaaaaaacagtgttcctgccatttgtaagttttcctataatattccttttattaactttaaaactggacttatcgggttcaaataggcagtatcccttttaagtgacctttgcaacccaagtgttacttgcttatttgatgctctcttgtattttaaatctcatttaaatctttgtctgtgaccaacaaagcttaagattttgtcttcatttaaaactctgaatctattccattgatcatgttagacgttcaaatgtttaatggtatagtctgacctagtgaaacaaaatggatgttgttactttttttaaagaatagaatgaaataactatttcacttgcccaaaattttaaatattttttcatctaaacttgtattgtttcccatagcagaatgtcaatattcacagtacatttctgtaaagagcaaaccaatataatgttttgagtgttgaaaaaaattccagatttttgaagaattagacaactcttcatctaccttatttctagttcacacagttatctcaaattccactgaaactaatgggatactgtcttgtgtagatgccagttgagtttataatgtgacctagtaaagctgtcttttttgttgtgttgtatgagtgtcggatcatgcttttaggaatacttttattaaaatggtgtgcattcatgcaaaaggccaactggcttttgtgaacaatagatcttttctcccctttattttgttctcttgacacttttgtgaaaattacctagcctgataaaaacattttgtaaaaatttgtataatactgttataaaatatttataatcccagaaaatgttgtgttaaatcttgtgcaaaaacagtatattcagaataaaagtttatcatttaaagtcaaaaaaaaaaaaagaaggtggtacccacagtatacgtgtgggcactggtgcttgagcctgtattaaaggaatca

SEQ ID NO: 1742 - protein, 1091 aa, Homo sapien
MAAGCLLALTLTLFQSLLIGPSSEEPFPSAVTIKSWVDKMQEDLVTLAKTASGVNQLVDIYEKYQDLYTVEPNNARQLVEIAARDIEKLLSNRSKALVSLALEAEKVQAAHQWREDFASNEVVYYNAKDDLDPEKNDSEPGSQRIKPVFIEDANFGRQISYQHAAVHIPTDIYEGSTIVLNELNWTSALDEVFKKNREEDPSLLWQVFGSATGLARYYPASPWVDNSRTPNKIDLYDVRRRPWYIQGAASPKDMLILVDVSGSVSGLTLKLIRTSVSEMLETLSDDDFVNVASFNSNAQDVSCFQHLVQANVRNKKVLKDAVNNITAKGITDYKKGFSFAFEQLLNYNVSRANCNKIIMLFTDGGEERAQEIFNKYNKDKKVRVFTFSVGQHNYDRGPIQWMACENKGYYYEIPSIGAIRINTQEYLDVLGRPMVLAGDKAKQVQWTNVYLDALELGLVITGTLPVFNITGQFENKTNLKNQLILGVMGVDVSLEDIKRLTPRFTLCPNGYYFAIDPNGYVLLHPNLQPKNPKSQEPVTLDFLDAELENDIKVEIRNKMIDGESGEKTFRTLVKSQDERYIDKGNRTYTWTPVNGTDYSLALVLPTYSFYYIKAKLEETITQARSKKGKMKDSETLKPDNFEESGYTFIAPRDYCNDLKISDNNTEFLLNFNEFIDRKTPNNPSCNADLINRVLLDAGFTNELVQNYWSKQKNIKGVKARFVVTDWWDYQSLSQRGWRKLARKPETYEDSFYKRSLDNDNYVFTAPYFNKSGPGAYESGIMVSKAVEIYIQGKLLKPAVVGIKIDVNSWIENFTKTSIRDPCAGPVCDCKRNSDVMDCVILDDGGFLLMANHDDYTNQIGRFFGEIDPSLMRHLVNISVYAFNKSYDYQSVCEPGAAPKQGAGHRSAYVPSVADILQIGWWATAAAWSILQQFLLSLTFPRLLEAVEMEDDDFTASLSKQSCITEQTQYFFDNDSKSFSGVLDCGNCSRIFHGEKLMNTNLIFIMVESKGTCPCDTRLLIQAEQTSDGPNPCDMVKQPRYRKGPDVCFDNNVLEDYTDCGGVSGLNPSLWYIIGIQFLLLWLVSGSTHRLL

SEQ ID NO: 1743 - DNA, 4340 bp, Homo sapien
agaaagcggcgcgcggagggtgtgagatggcagacaggtttgcaggaaaccctcagaaagggggctggaggatttagccactctgtcctccccttccggcagtccagggcctcctcccgagcacagcggcgctatggactctccaggatacaactgcttcgtggacaaagacaagatggacgctgccatccaggacctggggcccaaggagctgagctgcactgaactgcaggaactgaagcagctggcgcgccagggctactgggcccaaagccacgccctgcggggaaaggtgtaccagcgcctgatccgggacattccctgccgcacggtcacgcctgacgccagcgtgtacagcgacatcgtgggcaagatcgtgggcaagcacagcagcagctgcctgccgctgcccgagttcgtggacaacacgcaggtgcccagctactgcctgaatgcacgcggcgagggggccgtgcgcaagatcctcctgtgcctggccaaccagttccccgacatctccttctgccccgccctgccggccgtggtggccctgctgctgcactacagcatcgacgaggccgagtgcttcgagaaggcctgccgcatcctggcctgcaatgaccccggcaggaggctgatcgaccagagcttcctggcctttgagtcgtcctgcatgacgtttggggacctggtgaacaagtactgccaggcggcccacaagctgatggtggccgtgtcggaggatgtcctgcaggtctatgcggactggcagcgctggctgtttggggagctgcccctctgctacttcgcccgggtctttgacgtcttcctggtggagggctacaaggtgctgtaccgcgtggcgctggccatcctcaagttcttccataaggtgagggccgggcagccgctggagtcggacagcgtgaagcaggacatccgcacgttcgtcagagacatcgcgaagacggtgtcccctgagaagctgctggagaaagcgttcgccatccgcctcttgtcccgcaaggagatccagctcctgcagatggccaatgagaaagccctgaagcagaagggcatcaccgtgaagcagaagagtgtgtcactttctaaaaggcagtttgtacacttggccgtccatgcagagaacttccgctcggagatcgtcagcgtgagggagatgagagacatctggtcctgggtccccgagcgctttgccctgtgccagccccttctgctgttctcctccctgcagcacgggtacagcctggccaggttctacttccagtgtgaaggacatgagcctaccctcttgctcatcaagaccacgcagaaggaggtgtgtggtgcttacctgtccacagactggagtgagagaaataagtttggaggcaaactgggcttctttgggaccggagaatgctttgtgtttaggctgcagcctgaggtgcagcgctacgagtgggtggtgatcaagcaccccgagctgaccaagcccccacccttgatggctgccgagcccaccgccccactcagccactccgcctcctcagaccccgctgaccgcctctcgcccttcctggccgctcgccacttcaacctgccctccaagaccgagtccatgttcatggcggggggcagcgactgcctcatcgtcgggggaggaggcggccaggcgctctacatcgatggggacctgaaccggggccgcacaagccactgcgacaccttcaacaaccagcccctctgctccgagaacttcctcattgctgccgtggaggcctggggcttccaggaccctgacacccagtgacggcctgtgccacggtgactgagccgtggtggggcggtgggccgaggctgggctgccgcctcgggcagcagagagcagatgaaacccccatgtggtaggcagggttgggggacggcaggaccccatggccaagcctggcgttgcctggacctgctgctgcctctacctggggtttgggctgggcttccccagtccacctgcatctgggtcagagctggagggcctgctgtgcccccagccccacccagagctggcataggaagtaccttcctcctccgtggaggcttccatagcccaaggccttgggagtgtctgggtcttgctgcccctgagcctctctaggcagcctgagcccctggggtgggagtacaacggcagtgggaacgtgcagctaagggtgggcctgtggtgccccctgctggtgccgcatagcatcgcgccctcctgagcagggccctgcagcctggctggctggcgactgaatcccagcgtagatcccgagaacagactggcacccttgggcctgccccctggcggaccccaccccctgtcctgggcgtttgccccagttccctccccaggcctcctgggccacctctcacattaacccttcttggctgcctctgaggctcccctgggctgcgtttgggagctgctgggtgggaggaggagggtgggatttgtgctgggctccacccccagggagggtgggagctggagggggatgtcacatgtccttgtgtttctgcagagcctgaagcttttgctgggcctccctgcgtgttcccatctgaagaggtagccccgggagaggccctcagggaccgacccagaccagcaagctccatttccaggggtctgcccagagaagcctggacccagggggcttctcagctcccctcccttccagcccaggcctccttgagctcctgtagcctctgcagctgcccatttcacctctttgtcattgcaatgacctggggcccagggtcacgcccaagcccctctttgtggcatgctcatctcagtgcagccccaactgcttctctgcaccaggccccgtgccctcccctggccctggccacacagcacctccttggccaccttgcatggatgcatgtcctccctctgtccctcttgtggtgctgtggctggccacgtgtcagggttttctgtgagcctctcaccttacagcctttgggcccctgggcccctgccctgcctgagccctgcgctggccagacgcaggtaggtgccaggggaggccttgcctctgggcactatagggggcagccccctgccttgtgacctccctccatgccccatgacctccttcaactcgtcttgagggtctggtcaccacggaggggagaagggagacacagaggcccaagtggctgttctgggaccatggaagcctgggtcacagaggcaggtaccagcagtcctgcccccacccccgtccctgctggcctccagccagtgccacttggagtcccctgcaccgtgccactttccatccccacaccattgcctgctcctcccatggggctttagcctcccctgaccatctgctcatgtagcctctgactgggcgcacagtggtgcaggaggaaggaccgggaaccctgtgtggctttgggcaagctgacaaacccgtctggaactcagtttccccagctgtgaaatggggccagtccccatgccctgctgtcctcctcacaggactgttgagaggctcgcagggggatggggtgaatccctctcacggggagaggtatgggagggaagtcgccactcatctcagcccaccgcagccctccaggcccccgcctgagcccctgaggccctcatctgtaccgccagctttggtgttcattaaacatggtcttgctgcatcaactccagggctccaagctgagtctgatctcttcagccagaggggcctccgggggcttcctgggcctacagccaagcaggtgtgggaggctgcccgctgtagtgctcacccacattctatgactggaatgctgcaagcctcttccagagggagccctccaggagcagggaagtcatatccgtggaccatttgtaggtttccctctgcaaacttcctgaactgggtggtgatttttctggcgagttaagtccagcaggttctgcgtggctgcccccagggggccccacccgggccttccagtgatctggaccaggaagacggattgctgctgggtcatgatttccacatcatgagcgaagttctttgttttttgtgtgcatgcaaaatattgtttctttaaatttaatatcttttcctaacttttctactaacctagaaggtatgtgtgattattatcttttttattcttatcactgtacttgttagtatctgatattaggtattcccaaatagaacataatttattttgttaatgttctctatttcttcttgattatttattagctttggatgttaaaaattagccaaaagtggctgctctgcctatgaagtagccattctttgttt

SEQ ID NO: 1744 - protein, 595 aa, Homo sapien
DGRQVCRKPSERGLEDLATLSSPSGSPGPPPEHSGAMDSPGYNCFVDKDKMDAAIQDLGPKELSCTELQELKQLARQGYWAQSHALRGKVYQRLIRDIPCRTVTPDASVYSDIVGKIVGKHSSSCLPLPEFVDNTQVPSYCLNARGEGAVRKILLCLANQFPDISFCPALPAVVALLLHYSIDEAECFEKACRILACNDPGRRLIDQSFLAFESSCMTFGDLVNKYCQAAHKLMVAVSEDVLQVYADWQRWLFGELPLCYFARVFDVFLVEGYKVLYRVALAILKFFHKVRAGQPLESDSVKQDIRTFVRDIAKTVSPEKLLEKAFAIRLLSRKEIQLLQMANEKALKQKGITVKQKSVSLSKRQFVHLAVHAENFRSEIVSVREMRDIWSWVPERFALCQPLLLFSSLQHGYSLARFYFQCEGHEPTLLLIKTTQKEVCGAYLSTDWSERNKFGGKLGFFGTGECFVFRLQPEVQRYEWVVIKHPELTKPPPLMAAEPTAPLSHSASSDPADRLSPFLAARHFNLPSKTESMFMAGGSDCLIVGGGGGQALYIDGDLNRGRTSHCDTFNNQPLCSENFLIAAVEAWGFQDPDTQ

SEQ ID NO: 1745 - DNA, 2103 bp, Homo sapien
gggatctcaaaaaaaaagaaaaaagaaaatagtctctggttaaataacctctgaaagactccaccaaaaatttcatcttagcatttctccccaaacttcatgtaaaataaaatagagttgagagaaaaatagaaaggcaagggagtacctgttcactatttttattaaaccagtgttctactttattttaggtgtatcttttcttatttaaatgtcagctaaactttctttttaagatattgaatgaaagatgcccgtccttcaggtttcgtttaagcaagaatccccattctcaaataatataatataaactttccaaattcttaagtagatcatctgagattgaaagctaagtttaactttctcaaagatattttagccgccatgacacctagacaaagtggtatattaaattctgattaatttggtcctaaagcacctaagaatcattcttactttcttatccacaggggttattaagttttcacattaaaaaaaatccaacagtgaataatactgcattggggttactgtaattgttaagtaaaataagaaatacaaatctttagttagatcacatggcacctgactactgcttagaaaatggtaagacttactacataaatgatgagtcactattgacatctactatatcatatcataggttaggtatctaattataaatagtcaaatcagctgactcaaggtggcatagctcaagcagaggaagataatacaagttgagtatggatttaacactctaaacctgtcagcactgtaggaaaagtaacttaaaactgcacaccccacttatgcataatcatcagatataaagagggtacattcctgtaatttattgttgctctagtgatcttaaagaattaagtccacattcataaagtccaaacttgtctccaaggatttgctttgactttgggagtatctggatcattaagtaatttccggaggtcagagtaaaagctttttatctctaaatattacttccctggaatattagatgtagcagaagtcagtaacggagtgacctttctcttaaacaattcatagattcactgaaattttcttcaactttaggaaaattaaatatattccacagtgctgtaagtcttaaatattgattttcctctgaaatcttgactcatcctacccaccaacattctccctttgtacactatgttctttgtaatgttcatgttacacaagtgaaaattagtaacattagtaaattttcattgcaggtttatttgttcatatttctggatatataatccattactgttaaacttcatatcaatgttccgatatttcttcatcttatgttttatgttacaaaacaggttatttcactatatgtatgtttaattgattaattcttccctttttttggaaatgaaacagcactctcaattattgggacagaaaagttatttcatagggaatacttcaaacactgatatctacaacaggcagtaagattcgtcacaacaattggtatactgtcaatataccatacaaagttccatctggtcttgattaaaaattattttagttttctcaggaaaatgatacagagggagaattgcctagattatatgagagaaaaaaaagtagagagaaacataatgttttcttagattattacagcagtgaactatttccacctggtaagaagggtgcacttgagaatggggttcaagtactctaggaacatagatgtaagttctggatgcacagtagttgttgcttagctgtaagctggaaatttcaaggcagaaacagcagataccacaactataactgggtctccttgttttttgttttatgtgtatacgtgagattatggggaaagacaaaagtaatgcatagagatttattttttaacattcaattcataagcagtgtttatacctctttgtacttacttgaaaagtgtatattatgtaaatttagtataaaaacacttggactaattcataccatgtggtaaaatttcacattcaaaagaaatacccttctgttattaaaaataaaaaaaaaaggagccaggagggtggctcatgactgtaatcccagtgctctggg

SEQ ID NO: 1746 - protein, 86 aa, Homo sapien
MHSSCCLAVSWKFQGRNSRYHNYNWVSLFFVLCVYVRLWGKTKVMHRDLFFNIQFISSVYTSLYLLEKCILCKFSIKTLGLIHTMW

SEQ ID NO: 1747 - DNA, 2437 bp, Homo sapien
tcggatccactagtaacggccgccagtgtgctggaattcgcggccggtcgacccaccaccatgaggtcctgcctgtggagatgcaggcacctgagccaaggcgtccagtggtccttgcttctggctgtcctggtcttctttctcttcgccttgccctcttttattaaggagcctcaaacaaagccttccaggcatcaacgcacagagaacattaaagaaaggtctctacagtccctggcaaagcctaagtcccaggcacccacaagggcaaggaggacaaccatctatgcagagccagtgccagagaacaatgccctcaacacacaaacccagcccaaggcccacaccaccggagacagaggaaaggaggccaaccaggcaccgccggaggagcaggacaaggtgccccacacagcacagagggcagcatggaagagcccagaaaaagagaaaaccatggtgaacacactgtcacccagagggcaagatgcagggatggcctctggcaggacagaggcacaatcatggaagagccaggacacaaagacgacccaaggaaatgggggccagaccaggaagctgacggcctccaggacggtgtcagagaagcaccagggcaaagcggcaaccacagccaagacgctcattcccaaaagtcagcacagaatgctggctcccacaggagcagtgtcaacaaggacgagacagaaaggagtgaccacagcagtcatcccacctaaggagaagaaacctcaggccaccccaccccctgcccctttccagagccccacgacgcagagaaaccaaagactgaaggccgccaacttcaaatctgagcctcggtgggattttgaggaaaaatacagcttcgaaataggaggccttcagacgacttgccctgactctgtgaagatcaaagcctccaagtcgctgtggctccagaaactctttctgcccaacctcactctcttcctggactccagacacttcaaccagagtgagtgggaccgcctggaacactttgcaccaccctttggcttcatggagctcaactactccttggtgcagaaggtcgtgacacgcttccctccagtgccccagcagcagctgctcctggccagcctccccgctgggagcctccggtgcatcacctgtgccgtggtgggcaacgggggcatcctgaacaactcccacatgggccaggagatagacagtcacgactacgtgttccgattgagcggagctctcattaaaggctacgaacaggatgtggggactcggacatccttctacggctttaccgccttctccctgacccagtcactccttatattgggcaatcggggtttcaagaacgtgcctcttgggaaggacgtccgctacttgcacttcctggaaggcacccgggactatgagtggctggaagcactgcttatgaatcagacggtgatgtcaaaaaaccttttctggttcaggcacagaccccaggaagcttttcgggaagccctgcacatggacaggtacctgttgctgcacccagactttctccgatacatgaagaacaggtttctgaggtctaagaccctggatggtgcccactggaggatataccgccccaccactggggccctcctgctgctcactgcccttcagctctgtgaccaggtgagtgcttatggcttcatcactgagggccatgagcgcttttctgatcactactatgatacatcatggaagcggctgatcttttacataaaccatgacttcaagctggagagagaagtctggaagcggctacacgatgaagggataatccggctgtaccagcgtcctggtcccggaactgccaaagccaagaactgaccggggccagggctgccatggtctccttgcctgctccaaggcacaggatacagtgggaatcttgagactctttggccatttcccatggctcagactaagctccaagcccttcaggagttccaagggaacacttgaaccatggacaagactctctcaagatggcaaatggctaattgaggttctgaagttcttcagtacattgctgtaggtcctgaggccagggatttttaattaaatggggtgatgggtggccaataccacaattcctgctgaaaaacactcttccagtccaaaagcttcttgatacagaaaaaagagcctggatttacagaaacatatagatctggtttgaattccaggatcgagtttacagttgtgaaatcttgaaggtattacttaacttcactacagattgtctagaagacctttctaggagttatctgattctagaagggtctatacttgtccttgtctttaagctatttgacaactctacgtgttgtagaamactgataataatacaaatgattgttgtccatggaaaggcaaataaattttctacagtgaaaaaaaa

SEQ ID NO: 1748 - protein, 600 aa, Homo sapien
MRSCLWRCRHLSQGVQWSLLLAVLVFFLFALPSFIKEPQTKPSRHQRTENIKERSLQSLAKPKSQAPTRARRTTIYAEPVPENNALNTQTQPKAHTTGDRGKEANQAPPEEQDKVPHTAQRAAWKSPEKEKTMVNTLSPRGQDAGMASGRTEAQSWKSQDTKTTQGNGGQTRKLTASRTVSEKHQGKAATTAKTLIPKSQHRMLAPTGAVSTRTRQKGVTTAVIPPKEKKPQATPPPAPFQSPTTQRNQRLKAANFKSEPRWDFEEKYSFEIGGLQTTCPDSVKIKASKSLWLQKLFLPNLTLFLDSRHFNQSEWDRLEHFAPPFGFMELNYSLVQKVVTRFPPVPQQQLLLASLPAGSLRCITCAVVGNGGILNNSHMGQEIDSHDYVFRLSGALIKGYEQDVGTRTSFYGFTAFSLTQSLLILGNRGFKNVPLGKDVRYLHFLEGTRDYEWLEALLMNQTVMSKNLFWFRHRPQEAFREALHMDRYLLLHPDFLRYMKNRFLRSKTLDGAHWRIYRPTTGALLLLTALQLCDQVSAYGFITEGHERFSDHYYDTSWKRLIFYINHDFKLEREVWKRLHDEGIIRLYQRPGPGTAKAKN

SEQ ID NO: 1749 - DNA, 3191 bp, Homo sapien
ggccgcggcgcctagtttttcttttaggcattaggaagccttctttagagttcaaaattttagaagcctaatttgctcttacttccttcaattatgtgccatgtgttttggtttgtatatgttttaaattgtatatttccttggaatatgcttgaaatatttaagaatacattttcaaaatgtataatactgtattgttttgttgatcagaataataagtctcagttaaatgtttgttattactgatagtcaaaatgctcaatagaaatgatgagaggcattggttccaattcattgtcaaatgaacgttttctaattttgttcacagattctttccctttcgattgttctgtatgttaagatagtggcttctgctctcactgttttcctatttatattactagcaggtaggagtgctaattagaaaaacttagatggtattgaaattacagttgacaacttatatttttatgagatggagaaaaaagactaagttgatataacaacaaagtggactttttttcttccttatcctgcacgaaatattgcccttgtttcctctactttcctcttggtgttttctctttttttcaaacagaaacaggccaattccattttcttgagcaagaaagcttagtgtgttacttcatcaaggccagctaatactgtgttaaaccgggctgaaaatgagaaaacttgggagatggaggaatggggaaatggcagtgggataggtagggaaggattactcttaattgttttaaaagccataggaaagtcttccttgtacgtggctgtaaatttataagaactattgtgtcacataaaccaacaagaatcaacctttgctgcttcagataatttgatttttccagcaaggaaattaataagttactgattcttcagcatagaaacaactgagaagaattaatgcaatgtttcttcactagaaaacccaacccttcatttcttttcattgctccaaaacccagttttcaactaatggttttctcattaaactaaatgtttagaaaagttgtttagagtttttctttttcttttacatagtcctcctgatccagtataagactatttagtaacgtgcatttgtatggtactatctaaagtaagttagattgatgtaagagatcgggtagctgcggaacaaaattagttatatcctaattaggtacagtgaatgacacaaaatcattttagcaatgcttcttaaccttttggggtcacaggcgttttgagactgatgaatcctagggacttatttacccaggaaaatgcgtatataacatacatatctccctaaagtttacaatattgtagtggttcatgggccccctggttaagagcccattctaaagtacaatagggcatcatcccttttcctgcaaagcccaaaagtatatttctagggcatgaaaataacttgagtctattttaaggaattgtttcactctagaggtagataggggacctggctagaatctgacattaaaatatactttttaaaaaatattatatttggggtggggaaagtgattaaaaggtgaaaaaaaaacatagtattcagaagttttggaggttaatgtctttctctaagatttgccactttagaaattcaacagaaaagaggtaaaacagaaatggaatgtatctggaacatttttggcctccatagtgcagatatactatattaacaagtaatacatttatttacctgtcagatctccaggttttaagattttgagctttctagtattaggattcattaaatgttcaattcatttcatattctaaggaattaggttatttacttactaattcaggatgttaaaataacatccaagtcggacaaccaccaccaatgcacacagttaatgagatttctaaaatataataagtacaatgtaacaaacgtatagaattttgcatttgttgccaaaattagatgtttaatgacagcttatttagttcccatttgtgggacttctggaacatagaaaccattatcttacctggttatcccttgactaaatagcatatctgcaggaaaatatcttgtttgtagtgatatgccccaatagtgattgatttcactcttgaaatgagttatatcacttaatttgtataaatgttatgagtggagagacatgtacatgttaaaagcatgttgcattatatattcattttttaaactctataaatgttaagaataatataattgcagaaatatttttcttaaatacaatgtgtaacaaaattctccgtagcaactcacccactttgcagtttatgtgatccacacttttaaagaaattccataaatgtatattttgtattatgtattatttcctggtccaaagaaaatatgtgaattcagttctaactttaagaatgtactgtttgttttcaagttcattgaaaaattgcattcagcctgcgaatggttgcagattgtatgttagatgaaaagtagaaataatttctagtttggaaaactggtgccactaaataaacaggcaattacataatgtgtgtgtatttatgattgtttaatattgcaagcagcatttttattccaagaaacgtggagaatttgaaattagctgttggaagaccttaaaagaattgtttttttcagctgagaaataaatctgataggatttgaactagatttgttccttcctaattttaggaagtttactgaaagccaagaagtttgagttgatggttattgtcatgaaacattccagaaataaagaagccagagtagtttctctttggtaagaacattcccatttgtctgtcttctagtagatgattactcccttgaagagttgaaattgggaattgggagtggtctgggaaaggacttcctcacctggtatctgtggtatagtgcctgcttcaaaatggcacttaaatgtgtgtgtttctaggatgcagaaaggaggtgtttatttcctctgccaattctgatcattggctatattatatcctgtgttcattcatgtctgaaagtgacttaaacaggtttaattgattctagtcatggcttccataattagagaatttttagagttgaactgttaataaaagtgaaattctgtgagccgcaagagctcattttgtttattgtacaatgtgtcataaaacagtaatgaagcttcaaaaaa

SEQ ID NO: 1750 - protein, 22 aa, Homo sapien
PRRLVFLLGIRKPSLEFKILEA

SEQ ID NO: 1751 - DNA, 804 bp, Homo sapien
cacagctcccttcccaggacgtgaaaatctgccttctcaccatgaggcttctagtcctttccagcctgctctgtatcctgcttctctgcttctccatcttctccacagaagggaagaggcgtcctgccaaggcctggtcaggcaggagaaccaggctctgctgccaccgagtccctagccccaactcaacaaacctgaaaggacatcatgtgaggctctgtaaaccatgcaagcttgagccagagccccgcctttgggtggtgcctggggcactcccacaggtgtagcactcccaaagcaagactccagacagcggagaacctcatgcctggcacctgaggtacccagcagcctcctgtctcccctttcagccttcacagcagtgagctgcaatgttggagggcttcatctcgggctgcaaggaccctgggaaagttccagaactccacgtccttgtctcaattgtgccatcaactttcagagctatcatgagccaacctcaccccacagggcctcagtcgccaccatgtgggcctctccagtgcaaaccaccgagcattccaccatgaccggtcacagctacaaatccagagaccatcaatcctgctagagtgcagggtggcaagcacccaagggtggctgaccaagactgcagagtctcctccatcttcaggtccattcagcctcctggcatttaactaccagcatccagtggtccccaaggaatcccttcctagcctcctgacatgagtctgctggaaagagcatccaaacaaacaagtaataaataaataaataaactca

SEQ ID NO: 1752 - protein, 81 aa, Homo sapien
MRLLVLSSLLCILLLCFSIFSTEGKRRPAKAWSGRRTRLCCHRVPSPNSTNLKGHHVRLCKPCKLEPEPRLWVVPGALPQV

SEQ ID NO: 1753 - DNA, 4363 bp, Homo sapien
  Unsure 487-512, 1594-1624: Unknown base
tgctgatttagtaccatccattgctgcaacaccagattacgacaatactgcatgatttaacacacaaccacacacacaaagcacacgcgcacacgcacatacatgtacaaagggatattttggtggtggtggatttttttttgtcttttgtcttcctattcacattacaaaaggaaagggcaaggttctgcagaactgacgaaggaactaacagatactacaaaaatattacaatttgtgaagattagctcaaccctctcagcttttatgaatggagcggggaggggcccaggctgagtgggaagggcatgggagtgagggggccagctagttctatggaatagtttgatttttttctcttccttccccaccaatgttgaatgacatcttgctgttaaaaatactgttttctgggatttacagatcccctgagggccagccaggaaagaagagttggagtgagatgaaggaaggactatgacaaatnnnnnnnnnnnnnnnnnnnnnnnnnngaaggaaaaggaaacctggtagctttttggccttggattctctctgggctccagatgacctggatgccaagccactgcccctcctctgggggcctccaccctcctctcccggctggaggtttgcctgattttctgggatggggttgggtattttgttcactcaaatggtggcacatttttctccttccttcacccagaccttcttttatgtgtccagaaatggaggctagaaagcaggtgagaggtcctctggtcagagccacacggtctgtgccggccttcctccaccaagacccccaggagatgaagggagggaggaggtgagccagaagggcgctcccctgctgatgggtctgggctgggtcactagctgctcaaaatggcagctctagtttgctggcggctgactggggaggagaagggctctgtttctcttcccaccactcagcccacctgctgctttcctctgctttgccacatctgggtgtcccccggtggtctctgagagcctcaggacccctgcccctcctccagctctttgttcccagcctccccttgactcctgtcctccaagtcccaggggagtcccagcccctcagggacctggcggtgtctccatccttctccggttccctagtgggatagctgcctctgacttcagggtccctcctaccctcagccttctgagaacacaaaacaaatccaataccccaccctagtccagcaccatcgtgagcaagattcctgctgcgctgcttccaaaatggaaaagcatcacaactaaatacctaatatcctaccaaacaaaccacagtccctacgtagccctacttcagtcccaggagaaggaatccatgaatgggctgaggttccgagggtaggttgtggatgtctttctctagaggggtcccacacctggaaaagaggacacccagcccgtgggatgagggaagctgggcaagggagaaagttgttgagtcacactggggaccccagatgtagtgagctcagcaagaaaagccaggtccagagagagtcgcacagaattcctgactcacagcgcccctcggtccacagtggannnnnnnnnnnnnnnnnnnnnnnnnnnnnnnaggactgcaggaggaggaggatctgaaagcgctttggccttgtgttatgttttgcttcttttctgtgtcccctgttagcacattgtacttgaattacctcagttttttgtgacctcatgagctttcttaacctctgtatctctttttcggttggggcttggaggaatggggagggtgttcttttctgtttcttgtgtaaattaatagttgtttttatagacttcagctggtcaagaccctccccgtgcccctggagaccagcctcccagctggcaggaactgtgcaggaggagttgatactcaggatctgaatgtgagggccgaggagggcgaagagcgtgggtggggaggggatgttgctttggggtctcatggtccccagagggcactagggagtcacttttggctccgctggtgcatgaagtcacctgtggccaccatccgttccgcctaaaacactctggagagaatcccacctttcttacaatttgctgggccattgaggtttgagggcctgtgtttggatccttgcaactgtgtggtctcacctctgtgcgtgcattctcattgccagaattggtctattttcacggctggtctttggggaggggggcgggatccagcctttgttttgttgtgttggggtgggggtgttgtttttctaaaagctacctcttatgtttgtccagttgttcttttgttcctttcccgcctcccattctgctgctcttcctccctcttttccccaacctcccccgaccctcctgaattttggaaagcacatttgcaatattcgtgtttgctttgggacggaccctccgtttcatctcatgctttatgtgtaagagttttttattattattttttctttcctttctctctctgagaaagttgtggctgcgttttgatcttaggttttacaaagtggtttagggaagcggttttggggagaaggatcacgaggaatgtagggaagccggagggatgggtgctgctgcgacgacccccccgtccctcggccccagccctcctgccctccccttcaatctcatccaccaaatctgaaggccttaaaattgtgtgttgggaggatgtgaattgggaggacggtgtcactagactgtggattagggatggtaaagtagggaggatgctattttgcaactatagtaacgacttagtgttttggaaaggaaaagaagttaaacttgaaatacgtgactagaacagttgtcatgtttataatgtgaaaagggtgaaatcatttgggggaggggccgtctgtaagaaatcattatgcactatggcttcctcctctggtctgggaagaagcggggactggctggccctcaggggatctgtaaatcccagaaaacagtatttttaacagcaagatgtcattcaacattggtggggaaggaagagaaaaaaatcaaactattccatagaactagctggccccctcactcccatgcccttcccactcagcctgggcccctccccgctccattcataaaagctgagagggttgagctaatcttcacaaattgtaatatttttgtagtatctgttagttccttcgtcagttctgcagaaccttgccctttccttttgtaatgtgaataggaagacaaaagacaaaaaaaaaatccaccaccaccaaaatatccctttgtacatgtatgtgcgtgtgcgcgtgtgctttgtgtgtgtggttgtgtgttaaatcatgcagtattgtcgtaatctggtgttgcagcaatggatggtactaaatcagcacctggatgccccacccaaccccgtgggccctgcagaccccagtagggaggtatggggagagctcaggggagtgtggtttctgagggctactgtctggggacacctctgaacttactgtaccttcctctccccatgaagacacctgaatagagtctaacatgcctcttctccaacttcctacctacaacaacagaacagttctaatgttgcacggcctagtggccagggggcaagctaagaggctgtctggaggctttatatgtgtctggagttaaggggagaggaggagggtagacaggggtctctccccaggtgggatctgaatatctgtcctcccctcttcttcatgccacctgactccttcggccccctggctgcctttagctgtggtactgctgacaaccctgcttgctactgccttatccagcacagtgaaaaacttctccagcctggcaaggccacgttggttaatagtccctttcccatgtccagctcctacaaatatgtcccttaatgcatttggtgacatttacacctcactcatgtgctctttccctattcactccttcactcattcaaagcattaaaatcctatgtatatataggatagacaaatatatagatatatagatatatatatatatagcaagagattgatataaaatagtaaatatcattgctgctttgggctgctttggaggaggaggccatgaatatggggaaggcagatctggggtgcaggggtaggtagggaggctgggggacccagtgattcagtacaatccaagggatgcaacgcgggcttgtttaatctttgtgcctgaacagtttttccatgttgagaaaaaaaagaaaaaaaaactgctgcaatttttcacaagtgtatggtacctttctggatgctattggtacaattgctgtggatggaagagggccattgagcttacctccagccgg

SEQ ID NO: 1754 - protein, 40 aa, Homo sapien [sequence omitted]

SEQ ID NO: 1755 - DNA, 914 bp, Homo sapien
tcccaaagtgcagggattacaggtgtgagtgagccaccgcggccggcctctatcattttctgactcagcagctccaccaaaattgacatcctagcaaacactgtgaaggaattaacctaagtgcttccagagcatctcatgtaacctctatggagtaagtcactttttctgtaacatgtggcttttgaccttgatgaagactttgacttctcatccctgtctacatggaggaagatgattcagtggtggggaaaatgaacctcggtaacatttccaatgtccttcaagagggaaacaagttcagtgttatcatcgtggcattcgttagtttttttttttttaaatcacttttttagatacaactttatttttttatacctacatagcacatgactggggggataaagcatgtataagttgggagagggtaaagaatgtgtgactatgtatacagaaaatagactaaaatgtgcagcaaaatgatatatactgtaatctggtttttgaagtatctactattctggaatattgttaaacaactttttgcttttgaaaaaaaaaggtgccttgattcagttgcgtgacttagaacattcatcctattttattgtgatttttaatgtcttctgaccccaaactgtgtttttggttgcagtctggcggctgcaggcatagcgtcggttttgttccaataacagagaccaaagagttaatcagatatggttcagctgctacaattgtatgattcaaaggcaatttaatcaccccaaatttccatggcccccacagtcaagacctgccattcgttttctcttgcaggttggagtaaatttgcactttgaatcatgtgggtcatttggggaccttgttcttttctattttgctttattaataaaggaacttgtagaaacctc

SEQ ID NO: 1756 - protein, 56 aa, Homo sapien
MIQRQFNHPKFPWPPQSRPAIRFLLQVGVNLHFESCGSFGDLVLFYFALLIKELVE

SEQ ID NO: 1757 - DNA, 2623 bp, Homo sapien
ttgagcgcaggtgagctcctgcgcgttccgggggcgttcctccagtcaccctcccgccgttacccgcggcgcgcccgagggagtctcctccagaccctccctcccgttgctccaaactaatacggactgaacggatcgctgcgagggtgggagagaaaattagggggagaaaggacagagagagcaactaccatccatagccagatagattatcttacactgaactgatcaagtactttgaaaatgacttcgaaatttatcttggtgtccttcatacttgctgcactgagtctttcaaccaccttttctctccaactagaccagcaaaaggttctactagtttcttttgatggattccgttgggattacttatataaagttccaacgccccattttcattatattatgaaatatggtgttcacgtgaagcaagttactaatgtttttattacaaaaacctaccctaaccattatactttggtaactggcctctttgcagagaatcatgggattgttgcaaatgatatgtttgatcctattcggaacaaatctttctccttggatcacatgaatatttatgattccaagttttgggaagaagcgacaccaatatggatcacaaaccagagggcaggacatactagtggtgcagccatgtggcccggaacagatgtaaaaatacataagcgctttcctactcattacatgccttacaatgagtcagtttcatttgaagatagagttgccaaaattgttgaatggtttacgtcaaaagagcccataaatcttggtcttctctattgggaagaccctgatgacatgggccaccatttgggacctgacagtccgctcatggggcctgtcatttcagatattgacaagaagttaggatatctcatacaaatgctgaaaaaggcaaagttgtggaacactctgaacctaatcatcacaagtgatcatggaatgacgcagtgctctgaggaaaggttaatagaacttgaccagtacctggataaagaccactataccctgattgatcaatctccagtagcagccatcttgccaaaagaaggtaaatttgatgaagtctatgaagcactaactcacgctcatcctaatcttactgtttacaaaaaagaagacgttccagaaaggtggcattacaaatacaacagtcgaattcaaccaatcatagcagtggctgatgaagggtggcacattttacagaataagtcagatgactttctgttaggcaaccacggttacgataatgcgttagcagatatgcatccaatatttttagcccatggtcctgccttcagaaagaatttctcaaaagaagccatgaactccacagatttgtacccactactatgccacctcctcaatatcactgccatgccacacaatggatcattctggaatgtccaggatctgctcaattcagcaatgccaagggtggtcccttatacacagagtactatactcctccctggtagtgttaaaccagcagaatatgaccaagaggggtcatacccttatttcataggggtctctcttggcagcattatagtgattgtattttttgtaattttcattaagcatttaattcacagtcaaatacctgccttacaagatatgcatgctgaaatagctcaaccattattacaagcctaatgttactttgaagtggatttgcatattgaagtggagattccataattatgtcagtgtttaaaggtttcaaattctgggaaaccagttccaaacatctgcagaaaccattaagcagttacatatttaggtatacacacacacacacacacacacatacacacacacggaccaaaatacttacacctgcaaaggaataaagatgtgagagtatgtctccattgttcactgtagcatagggatagataagatcctgctttatttggacttggcgcagataatgtatatatttagcaactttgcactatgtaaagtaccttatatattgcactttaaatttctctcctgatgggtactttaatttgaaatgcactttatggacagttatgtcttataacttgattgaaaatgacaactttttgcacccatgtcacagaatacttgttacgcattgttcaaactgaaggaaatttctaataatcccgaataatgaacatagaaatctatctccataaattgagagaagaagaaggtgataagtgttgaaaattaaatgtgataacctttgaaccttgaattttggagatgtattcccaacagcagaatgcaactgtgggcatttcttgtcttatttctttccagagaacgtggttttcatttatttttccctcaaaagagagtcaaatactgacagattcgttctaaatatattgtttctgtcataaaattattgtgatttcctgatgagtcatattactgtgattttcataataatgaagacaccatgaatatacttttcttctatatagttcagcaatggcctgaatagaagcaaccaggcaccatctcagcaatgttttctcttgtttgtaattatttgctcctttgaaaattaaatcactattaattacattaaaaatcaaattggataaaaaaaaaaaaaaaaaaa

SEQ ID NO: 1758 - protein, 477 aa, Homo sapien [sequence omitted]

SEQ ID NO: 1759 - DNA, 4293 bp, Homo sapien
ggaacttagaaacttggaaggaagtgagaatggctatcttatggagaaataagtaagaaccaaaaatgttaaccctcctaaacaattttggagaggaccagccttaagcagaatggtttgagctggccatatgggacatgttggccagcctttccagtgtaggaccagctcatcatctttttaaaaaattagtcctgacttcgtttcaattgcctctataaattagaaaacaaaaagagccaagtgggccgtggtgatgtagagactggccgcgtactgatatagtttacataagattctgaagtgttgaaaatacaggctagaggttgaagagcaggcgtgctgaatgagagtggcgtcgcagcgatggccagcgctgaggggtatcaaggtcttattcatgcattctcatgtcttttgactccaagatgccttggaagcattcctttgctctgtttcacttttcaatttttgaaaaatatacacaacacctgggcaattctgtgttgctcttttgaatctctacatggcctctccatctgcccacttttccaaagggtcatcttgggttttcccctctcctgcagtggactcagtgtcgcctgccaggagaagtgccactgctgctcctctcttctggcccacaattgtccgtgcctgggctacagtgacagccacctgattcatttccctacctctccagtctagtctccacaccacagcgaaggcaatctttagaaaatctttataaaacctccagctcaaaattttctctggctcttcactgtccttcgagcaaaatctgaaaccctgagcataatttatggaagacctgtgaccgggctccagctgacctctccagcctcatctctcctcccaccctccctgcctcgctaggttccagctgcacagagaactttcaattcccgcattgctgggcctctgtaaaggctgcacctccccaccaggaaaagctctccccaccacctcttccttcacatggagaattctatcccatcctccaggtcccagcacagtcccacctcccccagggaatgtgcctgactcctctgcattaggttggaggctctccctgctgtgtgcccatggcacactgtgttcctcatgagatcttgagcttcttgaaggcgagggctgtgactggtccaccagttgtatcccaacacctgggacgatgcctggcctgtagcaggtgttcagtgaatatgcattcgtggaatttctaagtgaatgaaggaacacaggtttcacccttgcagtcagtggaaaaagttggtgagggactgaatccttgttctgttgtttatccatgaagcctatatatttctagtgcaaaaggcccagtgggtctcaaaacattcttggaggggtttgacacactgctattagtagtgactcataattccacgattccctgggatacagagaaggcaggggggtagtactgtttgaacaaaaatcttcccaagaccctggcaaagagatcttccttaggaatcagtggcatatgcgtttatgttctttaacagggaaagtaaaagtgagcgcacttttttgaagctcataaatactcatgtgactgtaaatttagaaatgttaattaattgggcctaatgtttgatctggaaaagtacttagcagtcaccaggaatttgccttgaactgactcgaaccacaaatcagaaccgtatttccacaatttaatttttccatgagacaatcataaaaactctgctgggattatattactaaaacctttatatcccattgcattggatatgtttgtaggtgagtaatgttaaatttaaaaaaaaaaattaataaagcatttgtttaggacctctgtatgcttgataaagtaaaaaaaaaatatatgaaaatgttaccctaacctacaataactaaacttgaacataatgataaaagcagaagaaaatagtcattgaaaacactgtagcagagttgaaatgcaacttaaacccttaatgaacttaagcttctttatcaataaagattgtcagtcaatacttaactataaaaatttaaggagtttcatctgatgaccattaagaattatcccaactaataatgtatatagcatttattgtgaaaccacaataaatataaaacacggtagtcaatgtcattaaaacttaaaatggaatgagcgtaatttgaaaaacaaaatagccctggcacttctttttgtttagaacaacgtatagaaagcacatgcctcactgagaatacttagtggaatctcgataaccacaaaagcaattaaatgcttttaaattatagaaaacactaaaatttttaaagttgttcacccttgatagcttttaagtaaggatcacttgtgatttatagttgtagcttttcttgaacacgtcctcttgcactgatgactaacaaagttagttttaaacggaggtttgctggtgggtttagtttttattctaatgaaaagaaacaacaacaaaaaaatcacaccaaggttagaaagatgcatatcagtatctttgctcttttgccttttatgagcaattagagtaaaccataatcatacctcctaaatgagtttctgagtgttaatattagtgctgtactcaaaggaatgtccatgttccacatggaaagtgttaaattactgagattagtgatttgtgtgtatatccatctgttgactgaccatctgtatgtgtgtcactgactgttgcgaggcttctgtgttccttagcagtgcctccaggtcaccataggacatttaattattgcatgacttaaaagattcaatacggcaaccacagcaaagagaaaattctagttctgccactaacacttcctttaacacaactctgctcaaacatgtgcctttcattgcattccaaagttatcgataattaccagctatcattgttttgggtgttttctctgctaatttctattggcatgcattctagatagttgcccattgtaactataaattgactatttaaataaacaaaagcataattcatggaaaactgccattctaaggtatgatgcaagatggtagatattctgcttccttttccatatagagatgcattactataaatcaggacttggtatatccatttgttacatattttcttaatgtgggagtcaaagtgaagctacatagctaacaagtcttattcatttagtaagttggctgccctctgctgttcataatgtttcttaaacagattcgtttcctctaagagaagtttctatctccccttggcaaaacaaaatactattcttgaaaacagaagttataataattaatgatatcattcagtgtgtaacattagaaactatgaagtttaaaagagtcagaggttagttttcctgtagaagaaatagtatgtctctctaaacagaagagaaattactggaaattctctctcctgtcagttaccctaaaaaccagctccagcaaagccatttcacgaacaattatgcatctataatgatctaaataataattggagaaaaatagtattttatggacattaaaatctcaattaatactattgcaactattgaatcaaatataaattgaattaaatttttaaattcaacagaaaatagcaaattggttactagaatattttgtctctaccaatttcactattacttctgaggtgtaaaccaaatataatactggcataaagaaggaaaaatatctcaagatttctaggcattttcctatgtctaatagtaggatgttctctctgaatttatttattacaaaaataacattacaacaataaagcaaaataatatttaaaagaaagaaaaaacaaacagtcgcaataccagaacaccattgtagtcgtttgtgtatgtgtgacttctttactgtgttcatgcagagacaagctttgtaatacctttgtaactactgtacaggtgcgtggttagattccgttttgactgcttggtatctcattgtaagcatttcccagggacactacacagtctttataattatgatcactacatcttttggataacttaggcttttgcactattttgtcacgatgcctcaaacttttctatcattgtctgtaattactcctataatcttttattataaaatattgaaacaaagtcacatcactaaaaacactgtgagtataatttattagtaagtgtagactgtgtatcattagcaaaacttgtaaatgcaacgagtcaataaaacaggcgtttccgagcataataatcagttttaccctttcg

SEQ ID NO: 1760 - protein, 113 aa, Homo sapien [sequence omitted]

SEQ ID NO: 1761 - DNA, 1913 bp, Homo sapien
gcacgttccgcggggactcatgccacgcgcgtcccggcccgacgcgcaattagcagccacctccgcagcccgccgccaccgcctccctgccctcccgggctgccgcagctaggagctccagccgtcgcctcgcgcaggctgcgggcattgtcctctcggttcgccgcccgggctgctgctgccgccgcggactgctgcggggcccggacccgcaccccagggatacgctgccgccgccgccggccggcccggcgcccggcctccgttcggtggtttccgccctgcgttctctgggttgctctctcctgggtttttcctgcgtagctgaggaaggggaagagaagtccagccgccaagcccagccttccccggcgcgcagccccgacggggccgcggcaggcgcggcgagagcgctgacggagccatgagagagtacaaagtggtggtgctgggctcgggcggcgtgggcaagtccgcgctcaccgtgcagttcgtgacgggctccttcatcgagaagtacgacccgaccatcgaagacttttaccgcaaggagattgaggtggactcgtcgccgtcggtgctggagatcctggatacggcgggcaccgagcagttcgcgtccatgcgggacctgtacatcaagaacggccagggcttcatcctggtctacagcctcgtcaaccagcagagcttccaggacatcaagcccatgcgggaccagatcatccgcgtgaagcggtacgagcgcgtgcccatgatcctggtgggcaacaaggtggacctggagggtgagcgcgaggtctcgtacggggagggcaaggccctggctgaggagtggagctgccccttcatggagacgtcggccaaaaacaaagcctcggtagacgagctatttgccgagatcgtgcggcagatgaactacgcggcgcagcccaacggcgatgagggctgctgctcggcctgcgtgatcctctgaggcggccaccgcgcgccggccgcgctctgcgcacaaaagccaaacgcatccgactctctaaatgtgatttatttcttgctttgagattggagaccactttgcattggccagggtgtcttgggagcccggctggcctccgcggccggcgtcccctgcctccaccctgtgcccgagggggtgtccggtcctgcccatccgatactctggtggaaatgtggctctttgcagcatgtacgtttctccctgattttggttgatgcatatttccccgtttaagtagccgttagggcgcagtatcggcagcttgacacccaccaagcaaaagtttcagcctggaaaaaaaatgggggggaagggtggaggaaaaggagggagagaaggtggaaatggtttttttttttttttttctattttctttctttttttttttttttttttttggtcaacagccgtttttctagttccaagttttaaatacatggaaggaagtccgggagaaccatatgaaggagcaggaggagaggaagaaactttttttccttcttttccaggagtagctggaaattaagatcgggttccttttctgccagcttggaagggcaaccccatgactgattgcgattctgaggatgtctatgcaaagttggattcttgttacagtgtatccaatctgaagtattgcacatctgaactgggactgttaacactgatgccaatacagtgtggggtgccagaaagtgtctgctgatatttgtggaaaaaaaaaaaaaaaaaaaaaaaaaaaaaaaaaaaaaaaaaaaaaaaaaaaaaaaaaaaaaaaaaaaaaaaaaaaaaaaaaaaaaaaaaaaaaaaaaaaaaaaaaaaaaaaaaaaaaaaaaaaaaaaaaaaaaaaaaaaaaaaaaaaaaaaaaaaaaaaaaaaaaaaaaaaaaacccccc

SEQ ID NO: 1762 - protein, 183 aa, Homo sapien
MREYKVVVLGSGGVGKSALTVQFVTGSFIEKYDPTIEDFYRKEIEVDSSPSVLEILDTAGTEQFASMRDLYIKNGQGFILVYSLVNQQSFQDIKPMRDQIIRVKRYERVPMILVGNKVDLEGEREVSYGEGKALAEEWSCPFMETSAKNKASVDELFAEIVRQMNYAAQPNGDEGCCSACVIL

SEQ ID NO: 1763 - DNA, 2188 bp, Homo sapien
tgatttgccctaatcctctgctgacattctgatatcagacaactaaaattataacattgggcagctattttgtatgatatatagggtagtggttcttaagcttattggtgagtaaccttcacttgggaagcttatttttaaaaatgtagaccttcattactttcctcctgagattttgaatcagtacctttgagagagggtccagtaaatctttgttttgaatgaactgatggttttgaagcaggtgacctggaggactgcatgtagaacacagtgatgtcaaggagtaaaggagagaacagaagtgagattagcactaatcacctctaatgccttatttccagtaaagtttagagaagaggaaaagctacttggcttgctcctttgaaggttttgtttccctcttaacacagaaattaaaaggtagaggagagatgctgaatgatgctttttttcttcttaatcttggggggtcattatgattaagttattgaatccatatcaccgtatgacagcacatgatgaaagaaaatcagatgtttgtttcaatcaaagtgaaacaaaatgagaataactatttgggcaaaacacttttatcactgctaagatactactagaactgagcagagaaatactcagagagagccatggcatagtactaattaataatggggtaccatttagcaactggaatattctctgatgatgcctgtttaattactcataggtgctaagtgaatgttaaaaattacggtgctggttgaataggccgagtagaatttgtgttagggcacatcccatggagatcttttttactgcttaattttttggagttacctcagtaacttaacaggcaggaatatggttttaatggaaaggaaaccatttgcctttaacagcattagtcccgctaagagaaagtttttgcttgtctagtttattacaggtctttgactttgtcagtatatggcaaatttagtataaaagatgattaattatcaaggctgatgaaatataggcagctgaaaagaaaattcttagcaattcataccttagaaggaaccctgaaggacaggacgccatagaaatcctgtttttttaaaaaagtaatttcaagtaagtttgcaaatgcaatgctagtaaaaagtatatagaggtatgtctttcacactatcttgttactattagaatttttgtagccatgtgcagaggagagaaaaggtgttggattttctgcagttctgattcagttctaagaatttggtgtgaaaagaatgtttgcaaaggagcaggcacaaaggtgagaacaggaatacgaaacacaacatctgtaaatgactaaattcagagggaatttagtggggcatatctcttaaatggttttgaataatttggtgttttaaccaatgacttaatttaacttagtgggtatactgttcccagtcccattactgatttttattcctctgtgataacatacacccaaataaagactgctatgtatttgactttaaaactataaagatgtaaaaaaggttcactaagccaaacaccttagaaaatagcctcagctatttgctatgtttatattatacctgcataaaagtatttatgtatagatgtacttaccttacacagtaagtacctaaaatttgtaaattgaatacttttgaatgtaagcagttgaagtaaaacctgtagtgagttcttcagtcagtcaacactaaacctgttttgtaaatttgatgctagtattacactggactttctcaaaatgaagtacacctatatatgcatatagtatatgagcatgcgtatttgtacaaaagcccttcaaaaggagttcagcttttataaacaccaaaacactctctgcctgtaaaatgtttttgctgaaatttgtatcattaactctcaaatttacatcttcatgtttgagatacgcttttaggactgtctatgcatgtagactttggtcaactctctcctcctccctcaataaatcagttaacttaaaaaatatattgtgaccatttttataaaatacatgttcataaaacagatcaacatatttagcttatacagaaataaaattaagtcaatccactcacaaagaatttctattttgtaaaaatgtagcttgtatttcagtataataaaatctgatgtaagaaactggaaacaacaa

SEQ ID NO: 1764 - protein, 9 aa, Homo sapien
ICPNPLLTF

SEQ ID NO: 1765 - DNA, 613 bp, Homo sapien
  Unsure 521, 548, 557, 560, 571: Unknown base
tttttcatgtttgaaaccttttattaaacaggcaatgcattgtgcagtggttaaagacacagatgcctagtggaaaagtttaaaaattatttttggaaacagtctatgaattgatgaaccctgccgtgttccttcatctccttctcagagtggctgtctttaggaaaacagattgttttatagctgctcttggaaacggcatccctgttttgccatgaatgtcatgcctcgtagtaaacatgaaagaagacaggatccacaggcaagagagcgaccagagacatgggctgatctcagctggaagcacagatgtcccttctcctagaagggcttctcttctggcctttgctgggtgtcctatttatgtgtccaatttcatttctattttcttccttgtctgaggcttctctatcaagggaattcgaaaagacacattcgtacctttgggcacaggaactggttcctggactttttcaatgttgttcttgtttctgggccctctggcccaggagtatggctgngtgtttatcctctttgttttgcctggntccttcctnttncccaagttcgncataacttgatgataaaatcaatctttaagtttcacagtttg

SEQ ID NO: 1766 - DNA, 2000 bp, Homo sapien
agctgaattttttttttccctctctctttcttcactcctttttctttccaaacagggaaaagtgttccacgaagcggtagcgcctttccgcctcgcgttttcctccctgaccctggtcccggctcccgtccgggcgccagctggtggggcgagcgccgggagcccatctgcccccaggggcacggggcgcggggccggctcccgcccggcacatggctgcagccacctcgcgcgcaccccgaggcgccgcgcccagctcgcccgaggtccgtcggaggcgcccggccgccccggagccaagcagcaactgagcggggaagcgcccgcgtccggggatcgggatgtccctcctccttctcctcttgctagtttcctactatgttggaaccttggggactcacactgagatcaagagagtggcagaggaaaaggtcactttgccctgccaccatcaactggggcttccagaaaaagacactctggatattgaatggctgctcaccgataatgaagggaaccaaaaagtggtgatcacttactccagtcgtcatgtctacaataacttgactgaggaacagaagggccgagtggcctttgcttccaatttcctggcaggagatgcctccttgcagattgaacctctgaagcccagtgatgagggccggtacacctgtaaggttaagaattcagggcgctacgtgtggagccatgtcatcttaaaagtcttagtgagaccatccaagcccaagtgtgagttggaaggagagctgacagaaggaagtgacctgactttgcagtgtgagtcatcctctggcacagagcccattgtgtattactggcagcgaatccgagagaaagagggagaggatgaacgtctgcctcccaaatctaggattgactacaaccaccctggacgagttctgctgcagaatcttaccatgtcctactctggactgtaccagtgcacagcaggcaacgaagctgggaaggaaagctgtgtggtgcgagtaactgtacagtatgtacaaagcatcggcatggttgcaggagcagtgacaggcatagtggctggagccctgctgattttcctcttggtgtggctgctaatccgaaggaaagacaaagaaagatatgaggaagaagagagacctaatgaaattcgagaagatgctgaagctccaaaagcccgtcttgtgaaacccagctcctcttcctcaggctctcggagctcacgctctggttcttcctccactcgctccacagcaaatagtgcctcacgcagccagcggacactgtcaactgacgcagcaccccagccagggctggccacccaggcatacagcctagtggggccagaggtgagaggttctgaaccaaagaaagtccaccatgctaatctgaccaaagcagaaaccacacccagcatgatccccagccagagcagagccttccaaacggtctgaattacaatggacttgactcccacgctttcctaggagtcagggtctttggactcttctcgtcattggagctcaagtcaccagccacacaaccagatgagaggtcatctaagtagcagtgagcattgcacggaacagattcagatgagcattttccttatacaataccaaacaagcaaaaggatgtaagctgattcatctgtaaaaaggcatcttattgtgcctttagaccagagtaagggaaagcaggagtccaaatctatttgttgaccaggacctgtggtgagaaggttggggaaaggtgaggtgaatatacctaaaacttttaatgtgggatattttgtatcagtgctttgattcacaattttcaagaggaaatgggatgctgtttgtaaattttctatgcatttctgcaaacttattggattattagttattcagacagtcaagcagaacccacagccttattacacctgtctacaccatgtactgagctaaccacttctaagaaactccaaaaaaggaaacatgtgtcttcta

SEQ ID NO: 1767 - protein, 373 aa, Homo sapien
MSLLLLLLLVSYYVGTLGTHTEIKRVAEEKVTLPCHHQLGLPEKDTLDIEWLLTDNEGNQKVVITYSSRHVYNNLTEEQKGRVAFASNFLAGDASLQIEPLKPSDEGRYTCKVKNSGRYVWSHVILKVLVRPSKPKCELEGELTEGSDLTLQCESSSGTEPIVYYWQRIREKEGEDERLPPKSRIDYNHPGRVLLQNLTMSYSGLYQCTAGNEAGKESCVVRVTVQYVQSIGMVAGAVTGIVAGALLIFLLVWLLIRRKDKERYEEEERPNEIREDAEAPKARLVKPSSSSSGSRSSRSGSSSTRSTANSASRSQRTLSTDAAPQPGLATQAYSLVGPEVRGSEPKKVHHANLTKAETTPSMIPSQSRAFQTV

SEQ ID NO: 1768 - DNA, 508 bp, Homo sapien
gctcgagaccgtctcaaaaaaaaaaaaggttaggaatcacaaattgtgtaaatatatagcaactttaagaagagagaagaatgcttataacctagtgaatatttctgctgagccttagttgtcttgtctaaaggaaaaaagagggaattgtagaataaaagtatttgttagtggaaattattgacctgaaaccatatcatattgttagtgtaactgaatgtatcagaaattgttcctatgtaggtattctgtgaaactggtttctaaaatgttacaggaaactgtttcctttttttttgtttgctttgtttaagtggaggtgggaggaggtagggaagaggtctgaatattaaaatatgtttatgttcatgtgttcataatacgttcctttttctctctgtgtgtgtataaaagtgccttgctcatgaatgcatttttgctattcacttcgaaaggaagcctttccccagcttggcagctgaataaaccaatagctttgtacatgctg

SEQ ID NO: 1769 - protein, 27 aa, Homo sapien
MNAFLLFTSKGSLSPAWQLNKPIALYM

SEQ ID NO: 1770 - DNA, 2569 bp, Homo sapien
tacatcctctccagactgtgtttcctgactttttaatgatcagatagcctcctattttttaactatgagttggaatttgctgcttttgatatgataagaaagttcaaagtttctcttccttgctttgttgtgtgttctaattcttttctgcccatcccccagtaaagaaaaggctcagtatgatttcttgaatagattgtttaagctattttcaaaacaggacttggtcaggggcaggtagtcttaaatgttcagaagccactggatggaaaattgtgagcacataagtgtttttcttggtcaaccatgtcattttatagccaaagtttgacttgacatactggaattaatccacacgactttgaaaagaataaactctttaaaaagagagtgagcgctccgagggtgttatgagagtcactgtctgaaaccctattgatcatattgtggcagaagaaatagagtcctgccatgaattatacttttcaggttaaaaaaaaaaaagcaatttgtaggacagtttgaataatttagtacaattgttaaaaatacagacatgcacattcctgtatgtgcatttttaaatgttcacgaatgatataagccagatatatttcttagaggtgcttgaaaaaagttatttcttcttgggctttattatctcaatttaaaaaaattaagatgcataattctcataagataacagattcagaagaatatagttcaagaaaaaaaattaaagaactcataaaggagaaggatgaggaggaagagagtgtgaaacaggagcctcagataacttggtaaaggcatgtctcccatttgggaactgatgttcctaagatccgcactgacgctgctcagccggtccatcacacagcaaaggcgtgaggaagggtcactgcccagctggactccagggtggtccacgcatgacagtcacaccgaaccttcatgaggatgtgaactgttggctccaatttaccattcccagcaattccactcagatatttgtatactaatgttcacagcagcgtgaactccacagcaggtggagtaatgttccattgtgtgcatatgccacattttgtttatccattcatctgttgatgcacatttcggttgttcccacctttgggctattattaataatgctgctgtgaacattcccaagagaaataggaagacggctttgctaagaactaaaaaagggatggacaacaagggcatatacccaggggcagtgttctatcatgacagctttactgagagcagagtagttctgctcagaatcagaacacttgttccctatagcccccctgattgccccacaaccaccaccgcatactccccttttcccaaccatgggcagcagattgagctattaacagaagtgtcctttcgctggatttctcaaccctttcctcatcgtccacatagagaaacagtaacagattgctactcacccaacacccaggtcaagtccaatgcaggtaggaataacagcaaatccttcaatttcttgattctgctcttaaaaatcttaacagaggcttccaggttctgaaaatattttctgcataaacgtgtgacactccatcacgaaactccctttggttatctgcttaaacttatcgcaaatgtctggaacgctggtggcttccaaaatcaactcctggtgctgcttaattaaggtcagggccacccggaagataatcttcgagccttcgttaaacaaacagtcccagatccgaagcactgtctccacgggcaagatgtccacaaacaggcagatgaaccagcgggacaccagcagcgtccacagcacaccgagacgctccatcagggcccccacagccggcagcttcgcccgcaccagctccccgaggacctcctggtcggtcttcaggcccagcatggccgggctgtagtaatctggtagtattcttccaacaagagcatctaacagccaaaaagattcttcttcattatttgttataagaatcagatatcctgctataaaattcattccctggcagtagcccactccctggttatggtgcccatatgccagcagcacattgtacagggtcctctgtaagcaggggtccgtggtcttccggaacttcacgttgtcggggaaggtccggttcaggtctgtcctgatggcgtcctccagcctggggtttctctctccctggagaagctggtggtagtagccgggattctggtccatctgcgcctgggccccactcagcaccatccagacgcgggcacggtgctccagcgggacccctttccggacatagcgcttcactgtccggctcctggggacgcccccgccctgcagcagccgggaccatttgatcgccctgcgggtgagcgtgaccaggtagctggagaaaaacttctcgtaggcggcgtcgtcgaagtcctcaggccgctcgaatccgtacgggtcgatcctggggacccgcgagcgctcggcgggctgcatgcggggagggaggcgcgcaccgagcgaggccagcgggtcccaagttcgcctcccggctccggggcgcttaag

SEQ ID NO: 1771 - protein, 24 aa, Homo sapien
MRGGRRAPSEASGSQVRLPAPGRL

SEQ ID NO: 1772 - DNA, 7484 bp, Homo sapien
tgctcacttctgacagccagacaagggctgtgctcaggggcagctcggctgggcacacagtaggtgctttagcggacagcactgaggcccccagcaagaagcccatgagctcctccccctcccgcagtgccgccgacatctacatccgggagtatttccacagccacgtcagcggcggccaccccgaggccactcctctccgtgtgatgtacacggaccggccgctgagccagacggacccagtcacgctgcagtactgttgcctgaccgacgaccgccaggctttccgcccgcccacacgggcagagctggcgcggcaccgcgtggtggtcaccaccacctcccaggcccgtgagctcagggtgccggtcggcttcttctcccacattctcatcgatgaggcggcccagatgctggagtgcgaggccctcaccccgctggcctacgcctcgcacggcacccgcctcgtgctggcgggcgaccacatgcaggtcacaccccggctgttcagtgtggccagggcccgggcggccgagcacacgctgctgcaccgcctcttcctgtgctaccagcaggagactcacgaggtggcgcggcagagccgcctggtcttccacgagaactaccgctgcacggacgccattgtcagcttcatctcgcggcacttctacgtggccaagggcaaccccatccacgccaggggcaaggttccgccccacccccggcactacccgctcatgttctgccacgtggcgggcaacccagaccgggacatgtccatggcgtcctggctgaatctggctgagattgcgcaggtcgtcgagaaggtgcaggaggcctacaacacctggcccagctgctggggcggccgtgagcagaggtgcatctgtgtcgtttcccacggtgcccaggtcagtgcactgaggcaggagctgaggaggcgggacctaggccaggtgtctgtcggcagttttgagatcctgccagggcggcagttccgggtcgtggtgctcagcactgtgcacacctgccagagcctgctcagccctggggcactggcccctgagttcttcaccgacgcccgcgtgctcaacaccgtcctgacccgcgcccagtcccagctggtggtagtgggggacgccgtggccctctgctccttcggggcctgcggcaagctctgggagagcttcatccgtgagtgcgtggagcggcacagtgtctgccccgagggcctgtccatggagcaggtcgagcagggtgtggcgcagagacggcgctggcctccccgaggcacacaggctggggcagcggggaactgggaggctgccccagagccagtaggggacctggccgaggagcaggcggctgtggtgacggccatggtgaaggcagagccgggagatgaggctctgagcccagcatcccgtgacatcacggcaaccacagcgcagacggaggctgcggcagcaccagcaggagacgcagtgaaggaagacgtggtgcccggggcctgtgcggcaggagcggctgctgcagcgggcgtggagtccacggaggctgaggatgcagaggctgacttctggccgtgggacggggagctcaacgctgacgacgccatcctacgggagcttctggacgagagccagaaggtgatggtgaccgtcggggaggacgggctgctggacaccgtcgccaggcccgagtccctgcagcaggcccggctgtacgagaacctgcccccggctgcgctacggaagctgctgcgcgcggagcccgagcggtaccgccactgctctttcgtgccagagaccttcgagcgggcgtcagccatcccgctggacgatgcctcctcgggccccatccaggtcaggggccgcctggactgtgggatggccttcgccggggatgaggtgctggtgcagctcctttcgggagacaaggcgcccgaggggcggcttcggggccgcgtgctgggcgtgctgaagaggaagaggcacgagctggcgtttgtgtgccgcatggacacgtgggacccgcgcatcatggtccccatcaatggctccgtgaccaagatcttcgtggccgagctgaaggacccatcgcaggtccccatctacagcctccggaagggccggctgcagcgtgtggggcttgagaggctcaccgccgaggcccggcacagccggctcttctgggtccaaattgtcctgtggcggcaaggcttctactacccgctgggcatcgtccgggaggtgctgcctgaggccagcacctgggagcagggcctccgcatcctcggcctggagtacagcttgagggtgcccccgtcggaccaggccaccatcaccaaggtgctgcagaaataccacacggagcttggccgggttgccggccgccgagaggactgccgcgccttcttgaccttcactgtggacccccagggcgcctgcaacctcgatgatgccctcagtgtccgagacctgggtcccaggtgcgaggtggctgtgcacatcactgatgtggccagcttcgtgcccagggacggggtgctggacgtggaggcgcgaaggcagggcgctgcgttctatgcccccggcagggagccagtgcccatgctgccggccagcctctgccaggacgtcctcagcctcctgcctggccgggaccgcctggccatctccctgttcctcaccatggagaaggccagtggccagctgaagagcctgcgctttgcaccctccgtggtccagtctgaccgccagctgtcctacgaggaggcggaggaggtgatcaggcagcacccgggtgccggccgtgagctgccggcccgcctggactccgtggacgcctgcgtcgtggccgcgtgctacttctctcggctgctgcgccggcaccgcctgcggtccgactgcttctatgagcagccggacgaggacggcaccctgggcttccgcgcggcccacatcatggtgaaggagtacatgattcagtttaataggctcgtggctgagttcctggtgggcagcgagtgcacgcggacggtcacgcctctgcggtggcagccagcaccccgcagccagcagctcaaggccctgtgtgagaagcatggggaccgggtgcccctgtcactgcacctcggccaccacctgcacggcggcgggggcagtccccccgacacgcggctgcacctcctggcctccctctggaagcaggtccagtttgctgcccgcacccaggactacgaacagatggtggacttggtcaccacggacgacatgcacccattcctggctcctgcaggccgcgacctccgcaaggccctggagcgctcggcgttcggccgctgcgcccggggccaccagcagcagggcggccactactcgctgcaggtggactggtacacgtgggccacctcgcccatccgcaggtacctggacgtggtgttgcagcggcagatcctgctggcgctgggccatgggggctctgcctactctgccagggacatcgatgggctctgccaggccttcagcctccagcacgcacttgcccagagctatcagcggcgggcgcgcagcctgcacctggccgtgcagctcaaggcccagcctctggacaagctgggcttcgtggtggacgtggaggcgggctcccgctgcttccggctgctcttccccagcaaccgggagacgctgcctgacccctgccccgtcccctacggctccctgcagctggccgagcacccccacgccctggcaggccggccgggcctgcggctcctgtggcggcgccgtgtctactcagcgcagggatccagcccgcccctgccactgcctggcactgtgccggacccacacaccctggccgtggagacggccctgtggaagcagctgctggagctggtggagctgcagcgctggccggaggcggctgctctcatccaggagaagggcgaggcgtcccagcggcgggagctggtgcaggtgcagcggagccactgtggccatttcctggaggtggcccgggagctgggcagtggggacaccctgcaggtgcagctcggcaccagcctgcagcacggcttcctggtaccgagccctcagctctggacggtggcaccgggcttcagcctctgcctggagcacgtggagcggcccggagactgcttctcaggccgtgtgtaccgggccccgagggaccggtaccgcgacgtggatgagtacgcctgcgtgtgggaaccattctgcgccctggagtcggccaccggcgcggttgccgagaatgactccgtcacacttcagcacctgagtgtctcctgggaggcgtcacggacgccgcaggggcagctgcagggcgccttccgcctggaggccgccttcctcgaggagaactgtgccgacatcaacttcagctgctgctacctctgcatccggctcgaggggctgctggctcccacggccagcccacgccccgggcccagcagcctcggccctggcctgaatgttgaccccggcacgtatacctgggtggcccacgggcagacggaggactgggaccaggagcgccgggcagaccggcaggaggctcccagacgggtgcacctcttcgtccaccacatgggcatggagaaggttccggaagaggtgctgaggccgggcaccctgttcaccgttgagctgctgcccaagcagcttcctgatctccgcaaggaggaagccgtgcgtggactagaggaggcgtccccgctggtcaccagcatcgcactgggccggcctgtcccgcagcccctctgcagagtgatccccagcaggttcctggagcggcagacctacaacatccccggaggccgccacaagctgaaccccagccagaacgtggcggtcagggaggctctggagaagcctttcacggtcattcagggcccaccaggtacagggaagacgatcgtgggcctccacatcgtattctggtttcataaatcaaaccaggagcaggtgcagcccggaggccccccccgtggggagaagcggctggggggtccctgcatcttgtactgcggcccctccaacaagtcggtggatgtcctggcaggactgctcctgagaaggatggagctgaagcccctccgtgtgtacagtgagcaggctgaggccagcgagttcccagtgccgcgtgtgggcagcaggaagctgctcaggaagagcccccgggaggggaggccgaaccagagcctcaggagcatcaccctgcaccaccggatccggcaggcccccaacccttactcgtcggaaatcaaggcctttgacacccggctgcagagaggggagctcttctccagggaggacctggtctggtacaagaaggtcttgtgggaggctcggaagttcgagctggaccggcatgaggtcatcctctgcacctgctcctgtgcagcctctgccagcctcaaaatcctggacgtgaggcagatccttgttgacgaggcaggcatggccacggaacctgaaaccctcatccccctggtgcagttcccacaggccgagaaggtggttcttctcggagaccacaagcagctgcggcctgtggtcaagaatgagcggctgcaaaacctgggtctggaccggtctctgttcgagcggtaccacgaggacgcacatatgctggacactcagtaccgcatgcatgagggcatctgtgccttcccctctgtggcgttctacaagagcaagctgaagacgtggcagggcctgaggaggccgcccagtgtcctgggccacgctggcaaggagagctgtcctgtcatctttggccacgtgcagggccacgagcggagcctgctggtgtccacggacgaagggaatgagaactccaaggccaacctggaggaggtggctgaggtggtccgtatcaccaagcagctgaccctggggaggaccgtagagccccaggacatcgccgtcctcacgccctacaacgcgcaggcctctgagatcagcaaggcccttcggcgagagggcatcgccggggtggccgtgtcctccatcaccaagagccaggggagcgagtggcgctatgtgctggtgagcaccgtccgcacctgtgccaagagcgacctggaccagcggcccaccaagagctggctcaagaagtttctgggcttcgttgtggaccccaaccaagtgaacgtggctgtcacgcgggcccaggaggggctctgcctgatcggagaccacctccttctgcgctgctgccccctctggcgtagcctcctggacttctgcgaggctcagcagaccctcgtgcctgccggccaggtgcgcgtctgcaggaggccaactatgccttcctgaagagccctctccacctgcaaggtgccaggactgggagggaaagtccagggcccccccaccctccccaccaccctccgccatcagcctgcctgggccagcctgcctcctggcctcaggatctccctggggcaggaagtgggtggacttggaggaggaacggcaagggccggtccccacactcttgcttctcctgggcatctggggacaggaacacctctcagggtggccaagaggggcttccttgggaccagtgtaaggaagttctgctgtccctgggaagtctcagaaccaggaaggaaaccctgtggaggctgccctttgacctttggacgccacctgtaatcactctggatggtgtctgtggagttcaggtttattttctatttaaatgaactaaaagccagcatcctgccgggcgtggtggctcacgcccataatccagcactttgggaagccgaggcgggcagatcacctgaggtcaggagttcgagaccatcctggccaacatggtgaaaccccgtctccactaaaaatacaaaattagctgggcgtggtggcgggcgcctgtaatcccagctacttgggaggctgaggcaggagaatcgcttgactccaggaggcgcaggctgcagtgagctctgatggtaccactgcactccagcctgggtgacagagcgagaccctgtcttaaaaaaaaaaaaacaaaacaaaaccagcatctgttactggaacagagacctcagcccaagctcaggacaaggaggcctccctgggagagggggcctttctcccaccatcaccgcctgtgtccttcaggggctgctggagggcagcccaaagccaggggcccaccccgccccaccccaccccaccccaccctctgaaatgtgaaaagcctgcactcttcctgtgggctgcgcagtgggctcgggggttggggggtgccggggcgatgcttccaccctggactgagtgttcggggcagcctgctcggctgtatgtttctcgcacgctcacccgcttcagtgcggctctgtccctgctgccgcctccagtcctgagggaggggcttgccccaccttctacattccaatttttatatctttgaattatgtgattagatattaatttaatgat

SEQ ID NO: 1773 - DNA, 2258 bp, Homo sapien
gcctggtgctgcccatgtcatacttttgacatacagaactgtaagatagcaagtgtatgttgactaagctgctaaattggtggtgattgcttatggcagcaatagaaagctatatatcctagagaataaagaaggctagagctgctgtggaatgcacttgggaaagctggctacattgataatatgtaactgccatgggcatagttgcctttgtattcttccaggtctgggaagtacaacttagacttcagatctcgtaatgacccaggaggcatataaacctgagcagctagtggccctgtacaagtccttcatcagggaaaaacattgagtattccctgattaaggacttgtacagaggactctgttttccctggtgtttctggtgtgtctcaaaaattgtttgactgtgatgacagggaagtttggaagaagttcactgctaatgcatgtctccaggaagcagggaatgatctcacagtgacacttgaggcacattgctgaggccgtcgatgagaattcatgtaactttctccagcttacagtggactagattgacatgcaagctgatccagtccaattggtagggcatcatggtttctcattactcactgacttaaaatacttttattgccatcctggtgaagcactgcactgggtagataacacaggggcaccttgctgatcagagcccttggccaggtacaaagagctcagtttctaaaactctgtcatttcaataatgttataaattgaatcataccagtatgtaattttatgggattcgctttttttctgttgatctctttttttctgagtcatctcagctgttgtgtgtatcaatagttcatttccttttactgttttgtttggtttaactcattgacctattgaaggatatctgggctcattccagtctgtgaataatgctgctgtggacattcatgtgcaagtttttgtgtgaacattaagttttcatttctttaagataaatgcccaggagtgaaactgatgggttgtatgtagttacaaactgccaagctgttttccagagttggcggtaccattctaatttcccatgacaattttttgaagagtccaagctagttgctttagagtgcctcacctacattttttaattgtctgactttttcctaatgacatcacttaatttgttcctcaatctcctgaatttcctatagactggaggttaggtctggtggtttgattagattttttaaaaaaatatgacttcatctgtgatgctgtgtactttatgttgcataacatgaaccctaagaacagagtgagctgctggacagcaagtttcatggggtgcagtaattaacacaccacatagtataaatctgaaataatgacaaatgtgttaagggccttgggatattgggccatgtactctgaggagcacaaggtgaggtgcaggttcctgcccctaaagaactctatcttttgagattagcaactaacagtgtgagcccactaataggatgtgaaagttgtcaaaatcaagttctggtcattgtgttaaaaatcctaacaaatagagctggggaaggccgtgaaaggacgattttcatgcacagatgtctgataatgaggactatcattaaaagactgcacaaaaccacaccttgcacaaaggccatcacaacctgacacacacaaaaaatacttctatgaggacatttgcccagcaactccctgtccaatgtccaactggcaacatccttgttattgatccttgtagccaaggataattctctcaaaacaatcatttttgctttaaaaaccgttgtcttccttgacctccctgtatatgcacatagtttactgtggcacttgtattcttattgcaatgcctactcctgaataaacatcattttctttcagagagtctccctctctgttatttaggctgacaaggatatgccaagaagtagcttggatatagcagttaactctgcctttaggatatgtgtatggggatataagagttaactaaaagctgacctttgagttggtccttgaataaaagaagaatagattccaaaaataagaggaataaataatgatcctgagctaggagagtacattttgcagacctttggtttccatattaagaaattcagatttttatgtacaataaagaagttctggaattctcgtaaaaaaaatctatgtcgggtgcggagaaagaggtaatgaaatggcaggaaatcgatatgagcttatcatac

SEQ ID NO: 1774 - protein, 11 aa, Homo sapien
MKWQEIDMSLS

SEQ ID NO: 1775 - DNA, 2616 bp, Homo sapien
  Unsure 2080, 2156, 2215, 2270: Unknown base
ctttatggcgtgggagaggccacagcccggactccatcgactcccccggctcttagactaaaatcatgcccaagttcaaacaacgaagacgaaagctaaaagccaaagccgaaagattattcaaaaaaaaagaagcctctcactttcagtccaagctaattacacctcctcctccaccaccctcaccagaaagagtcggtatttcttcaatagatatatctcaaagcagaagctggctaacatcatcctggaacttcaattttcctaacatcagagatgcaataaaactttggacaaatagagtatggtctatatacagctggtgccagaactgcataacccagagtttagaagtattgaaagacaccatctttccatctcgtatctgccaccgagaactttacagtgtaaaacaacagttttgcattttggaaagtaaattatgcaagcttcaggaagcactgaagaccatctcagaaagttcttcctgtccaagctgtggtcaaacatgtcacatgagtggtaaacttacaaatgtgcctgcctgcgttctgatcacccctggagactccaaagctgtgcttcctcccacactgccacagccagccagccattttcctcctcctcctccacctccacctctgccacctcctccaccaccactagcacctgtgttgctcagaaaacccagtctcgctaaagcacttcaggctggaccattaaaaaaagatggacccatgcagataacagttaaagatctgctgactgtaaaattaaagaagacacagagtttagatgaaaagaggaagcttataccatcgccgaaagcacggaatccactagttaccgtctctgacttgcagcatgttaccctgaaacctaactccaaagtgttatcgactcgagttacaaacgtcttaatcactcctggaaaaagtcagatggatctgcggaaactgcttagaaaagtcgatgtagagaggaggccaggtggaacccctcttaccaataaggaaaatatggaaacaggaacaggactgactccagtgatgacgcaggccttaaggagaaagtttcagctggctcaccctagaagcccaactccaactctgccactttctacaagcagctttgatgaacaaaactgatgccaactctgcctcactccatgagatgatccataacaaatacagataaaaacacccagctgggtgcagtggctcgcacctgtaatcccagcactttgggaggctgaggcaggtggatcacctgaggtcgggagtttgagaccagcctggccaacatggtgaaatcccatctctactgaaaatacagaattggccgggtgtggtgtcacgcgcctgtggtcccagttacttgaacctgggaggcggaggttgcagtgagccgagattgcaacactgccactccagcctgggtgacagagcaagagaccctgtctcaaaaaaaaaaaaaaaaaaattaaatgggtagtgacgttaagagatatatatcagcttctagtaaaagtttttttttttaaacctgctagctacatttacattatgtaaaaataaatggaataatcactgagaataaagcagttgagtatttataacaataatattttatggggcgcttataatgtttataatattgtaaaccactgtgtactctattcatttaatgctaaatgacttgaccattcttgtgggataagagatcattaaaaaaatgctagggccgggcaccatggctcacgcctgtaatcccaggactttaggaggccaaggcaggtggatgacttgagctcaggagtttgagaccagcctgggcaacatgatgaaaactccgtctctaccaaaaatcaaaaaaattagccaggtgtgatgttgtgcgcctgtagtcccagctacttgtgaggctgaggtgggaggatggtttgggccccggaggtagaggttgcagtgagctgagattgtgccactgtattccatcctgggcaacagagccagaccctgcctcaaaaaaaaaaaaaaaaaaaaaaaggcctggctttgctacataatgaggccaggcnaaaaaaaaaaagtcctgtggaaatcatatagacaaacatttgcaaagctgctactgccattgtaccagtgttaaantgtgttctaccttgcatcttttactgatttttatgacagattttatattgtaaccattngagaactctgtaagtgctatggcttccttaaactacgatttatcatatgctcccngtgtttactttgagactgaatggcaaccagagaatgtaaacaaccaaggtgcatctggttatgtttgcacagtggctcacgcctgtaatcccagcactttgggaggctgaggcgggcaaaacacttgaggtcagacgtttgagaccagcctggccaacatggtgaaaccccgtctctaccaaaaataaaaataaaaattatccaggcgtggtggcatgtgcctatagccccagctactcaggaagctagagcacgagaattatgtgcatcctggaggtgaaggttgcagtgagccaagatcacaccactccactccagtctggacaacagagtgagaccctgtgtc

SEQ ID NO: 1776 - protein, 360 aa, Homo sapien
  Unsure 2080, 2156, 2215, 2270: Unknown amino acid
MPKFKQRRRKLKAKAERLFKKKEASHFQSKLITPPPPPPSPERVGISSIDISQSRSWLTSSWNFNFPNIRDAIKLWTNRVWSIYSWCQNCITQSLEVLKDTIFPSRICHRELYSVKQQFCILESKLCKLQEALKTISESSSCPSCGQTCHMSGKLTNVPACVLITPGDSKAVLPPTLPQPASHFPPPPPPPPLPPPPPPLAPVLLRKPSLAKALQAGPLKKDGPMQITVKDLLTVKLKKTQSLDEKRKLIPSPKARNPLVTVSDLQHVTLKPNSKVLSTRVTNVLITPGKSQMDLRKLLRKVDVERRPGGTPLTNKENMETGTGLTPVMTQALRRKFQLAHPRSPTPTLPLSTSSFDEQN

SEQ ID NO: 1777 - DNA, 649 bp, Homo sapien
ccctactgcgggtcccgctgctggcagcgctggaaactgggtggacggcatgggttggtctcaggatttgttccgcgccttgtggagatcgctgtcaagggaagtgaaagagcacgtgggcacggaccaattcgggaacaaatactactacatcccgcagtacaagaactggagaggacaaactattcgagagaaaagaattgtagaagcagcaaataaaaaagaagtagactatgaagcaggggatattccaacagaatgggaagcttggattagaagaacaagaaagactccacctactatggaggaaatactaaagaatgaaaaacacagagaagaaatcaaaataaaaagccaagatttttatgaaaaagaaaaactccttagtaaagagaccagtgaggaactcctgcctccaccagttcaaactcaaattaaaggccatgcctctgctccatactttggaaaggaagaaccctcagtggctcccagcagcactggtaaaacctttcagccaggatcctggatgccacgagatggcaagagccacaatcaatgaatgcattatggtcaaatcttttcatgtatatggatgtgactattttaacaaataaaagaagtgaaaagttaaaaaaaaaaaaaaaaaaaa

SEQ ID NO: 1778 - DNA, 678 bp, Homo sapien
acattttctatgtagtaaacatgtatgtgtatgtgtgtgggtgtgtgtctaattactttgttggacagattcctgtggtttggaactgctggggccaagtttatacaaaaatctacatttttgagtaaactccccatgactctagtaagtttccacagtatttgagtattctttatttcctaaagctgtacaaacatcagataatcaatatttgtaaggatcgataatataatttataatgaaattgctttatcagctattaatgttaactacatcatcttcatatagccttataactcatttgtgctattccattttcctctgttccttttattttcacttcccttgtaatgttagtctctttgtactgatttctgaagagttcatttatgattaaacatgttaacattttgtctagaattgcaaatatgttttttctcattcattttactatggtgttttattttttggttatacagaagttgtatattgaaatataatcttgttctgttttatgactttggagttttgtggttttttaaaacatgtttacattggtatcatttatttgtattgccttctatttcagcagttagtttgtcatttctttttccattaatcatcattctggtgttaatgaatgcattaaatatttaaagtaaaaaaaaaaaaaaaaaa

SEQ ID NO: 1779 - protein, 46 aa, Homo sapien
MCMCVGVCLITLLDRFLWFGTAGAKFIQKSTFLSKLPMTLVSFHSI

SEQ ID NO: 1780 - DNA, 3152 bp, Homo sapien
ccgggcaggcttggcggcccgcgtgggctcctccccgcggcgctggctcagtgcgaacccggcgagggcggctgggcgctttagaactgccctgcaggccaggaacctctgtaggtttccctggggaggtctggggtgggagttccgtacgccctgagctccaggttcttgtacttttcttagttgtgagggagggaatttgcgaaagaattttccttatcaggagattcaaacttgtcctcgcaaggaaatggataactcacatccacagcatgtcccttccttttcagccatttaaagttttggcaactgaaactgtaagtcacaaggcattagatgcagatatatacagtgcaattccaacagaaaaagtggatggaacatgttgttatgttactacctataaagatcagccatacctttgggctcgactagatagaaaacccaacaaacaagctgaaaaaagatttaaaaattttctacattcaaaagaaaacccaaaagaatttttttggaacgttgaggaggacttcaaaccagctccggagtgctggataccagcaaaggagacagaacaaataaatgggaacccagtgcctgatgaaaatggacacattcctggtatcatgatatctcttctagtgcagttttgtgtttactagtaaaatgatcaaaatatccattcaatcagaaattacagaattttaatctgggtcttcattaatatgtatagcacagaatttctgaatcaaatttatgtaaagtcctacatacattttatatcaaagatgtttcatatcaagaatgtcctcttaggtttagaatcttttctaagatgggcattttttactagctgtagtctgtgacaataaagcgtcaaaagagaatagccttgaggccaggtgcagtggtcacacctgtaatcccagcactttgggaggctgaggtgggtggattgcttgagcctaggagttttaagactaacctgggcaacatggcaaaaccctgtctctaccaaaaatacaaaaaattagttgggcatggcattgtgcgcctgtagtctcagctactcgggagactaatgtgggaaacacctaagccccggaagttgagactgcagtgaaccatgatcgtgccactgcactctagcctgagagttggactgtgaccttgtctcaaaaaaacaacaaaagaagagggaatagcttccaagttcttgtcaggatagatgagatgatctagtctgaaatgagatttcaagaagtggctatacctttagattagggatgggaaaattttgcgaaggtatgctgaataggaagatatcccagattaaggttataggttctcaaccggcatgtcttgagtgcccattatgtgcaaagtcctcttagtttctggtaatacaaaaatgaaggtcagaacccttgtcctcaatgatctttaattagacattgggagaaattaaccaataatagtatgatttaagaactaacaggaatgaatacatcaggtgccactggagaaaagaggaattcctcattcagcttgtggttagtggaggctcccaagaggagtagacatctgtactgaagcttaaggaccaggaagtcagctgacaaggaagagggaagatcagcttaggcaaactcccaggaagagggaatatcagcttaggcaaactcccaggaagaggagagggcatggggtattttgaatattttatgtaacactttattgcagctagaatgttcagggtatatgacatcatgaagtggctgtaaaagttgaggctagaagtgtggtgggctcagatcggaaaggcccttttattccatctaaaggagtttgaagtttatcctgaagataatggtttttaatcagtggtacagcaaaagcaaatttaagttttagaaatagaactatgataaaagtgggttggatttcactggaggctaggtgaccagcaaagaagttattacagtaatctagtgtgagtaatgaaggaattctggcaataagaatgagaagggtaatagcaataacattcaataaacgtggcatcagtaaattgttcggtatatattggaacattttaataaacttggaacacttaactgcattatgtccattgtccctgaagcttgagagaaggcagagagaaaacttattttatataaaaaattttgagtgctgtgtcttagaataatgttcagttcttaatgaataagggtgaattttctagtaagagaatgctaggtgctgtgtagtgaataataggttaattctacagaataaaaaatgaacccttatgattttttaaaaagtaataaactgttaactttcccactgaattttaaagtaatatctctttgcgatagacacccagaaaacatgagaaatttacaacaaaaatataaattacctgtagtgtcagtccaaagaaaaacgatctaataacaaataattttcttctttatatgataggttgggtaccagtagagaaaaacaacaaacagtattgctggcattcctctgtagttaattatgaatttgaaattgccctggtactaaaacatcatcctgatgattctggacttttggaaattagtgcagtgccactttcagatctcttagaacaaacactggaactcataggaacaaatatcaatggaaacccatatgggttagggagcaagaaacatccattacatcttcttataccacatggagcatttcaaataagaaatctaccttcattgaagcacaatgatctcgtgtcctggtttgaagattgcaaagagggtaaaattgaaggaatagtgtggcattgcagtgatggctgtttaataaaggtccatcgccatcatcttggcttatgctggccaattccagatacttacatgaattcaagaccagttattatcaacatgaacctgaacaaatgtgactctgcctttgatattaagtgtttgtttaatcattttttaaaaatagataatcagaaatttgttagactcaaagatataatatttgatgtataaaatgcaaataaaattagtttatcattatattctaaaaaaaaaaaaaaaaaaaaaaaaaaaaaaaaaaaaaaaaaaaaaaaaaaaaaaaaaaaaaaaaaaaaaaaaaag

SEQ ID NO: 1781 - DNA, 6309 bp, Homo sapien
cggggccaaagacctggtgtgttccaagatgtccagggccaaggatgccgtgtcctccggggtggccagcgtggtggacgtggctaagggagtggtccagggaggcctggacaccactcggtctgcacttacgggcaccaaggaggcggtgtccagcggggtcacaggggccatggacatggctaagggggccgtccaagggggtctggacacctcgaaggctgtcctcaccggcaccaaggacacggtgtccactgggctcacgggggcagtgaatgtggccaaagggaccgtacaggccggtgtggacaccaccaagactgtgctgaccggcaccaaagacacagtgactactggggtcatgggggcagtgaacttggccaaagggactgtccagactggcgtggaaacctccaaggctgtgctgaccggcaccaaagatgctgtgtccactgggctcacaggggcagtgaatgtggccagaggaagcattcagaccggtgtggacaccagtaagactgtcctaacaggtaccaaggacaccgtctgtagtggggtgaccagtgccatgaatgtggccaaaggaaccatccagaccggcgtggacaccagtaagactgtcctaacaggtaccaaggacaccgtctgtagtggggtgactggtgccatgaatgtggccaaaggaaccatccagaccggcgtggacaccagtaagactgtcctaacaggtaccaaggacaccgtctgtagtggggtgactggtgccatgaatgtggccaaaggaaccatccagaccggcgtggacaccaccaagactgtcctaactggcaccaagaacactgtctgcagtggggtgaccggtgccgtgaacttggccaaagaggccatccaggggggcctggataccaccaagtctatggtcatgggtacgaaagacacgatgtccactgggctcacgggggcagcgaatgtggccaagggggccatgcaaactgggctgaacacaacccaaaatatcgcaacaggtacaaaggacaccgtctgcagtggggtgactggtgccatgaatttggccagaggaaccatccagacaggcgtggacaccaccaagatcgttctaactggtaccaaggacactgtctgcagtggggtcaccggtgctgcgaatgtggccaaaggggccgtccaggggggcctggacactacaaagtctgtcctgactggcactaaagatgctgtgtccactgggctcacaggggctgtgaacgtggccaaagggaccgtccagaccggcgtagacaccaccaagactgtcctaaccggcaccaaggacaccgtctgcagtggggtgaccagtgctgtgaacgtggccaaaggggccgtccaggggggcctggacaccaccaagtctgtggtcataggtacaaaagacacgatgtccactgggctcacgggggcagcgaatgtggccaagggggctgtccagacaggtgtagacacagccaagaccgtgctgaccggcaccaaggacacagtgactactgggctcgtgggggcagtgaatgtcgccaaagggaccgtccagacaggcatggacaccaccaaaactgtcctaaccggtaccaaggacaccatctacagtggggtcaccagtgccgtgaacgtggccaagggggctgtgcaaactgggctgaaaacgacccaaaatatcgcgacaggtacaaagaacacctttggcagtggggtgaccggtgctgtgaatgtggccaaaggggccgtccagacaggtgtagacacagccaagaccgtgctgaccggcaccaaggacacagtcactactgggctcatgggggcagtgaatgtcgccaaagggactgtccagaccagtgtggacaccaccaagactgtcctaactggtaccaaggacaccgtctgcagtggggtgaccggtgctgcgaatgtggccaagggggccgtccagacgggtgtagacacggccaagaccgtgctgaccggtaccaaggacactgtctgcagtggggtcaccggtgctgtgaacgtggccaagggtgctgtgcaaactgggctgaaaacgacccaaaatatcgcaacaggtacaaagaacacccttggcagtggggtgaccggtgctgcgaatgtggccaaaggggccgtccaggggggcctggacactacaaagtctgtcctgactggcactaaagatgctgtgtccactgggctcacaggggctgtgaacttggccaaagggactgtccagaccggcatggacaccaccaagactgtgttaactggtaccaaggatgctgtgtgcagtggggtgaccggtgctgcgaatgtggccaagggggccgtccagacgggtgtagacacggccaagaccgtgctgaccggcaccaaggacacagtcactactgggctcatgggggcagtgaatgtcgccaaagggaccgtccagaccagtgtggacaccaccaagactgtcctaactggtaccaaggacaccgtctgcagtggggtgaccggtgctgcgaatgtggccaagggggccgtccaggggggcctggacactacaaagtctgtcctgactggcactaaagacaccgtatccactgggctcacaggggctgtgaacttggccaaagggactgtccagaccggcgtggacaccagcaagactgtcctgaccggtaccaaggacaccgtctgcagtggagtcactggtgccgtaaatgtggccaaaggcaccgtccagacaggtgtggacacagccaagacggtgctgagtggcgctaaggatgcagtgactactggagtcacgggggcagtgaatgtggccaaaggaaccgtgcagaccggcgtggacgcctccaaggctgtgcttatgggtaccaaggacactgtcttcagtggggttaccggtgccatgagcatggccaaaggggccgtccaggggggcctggacaccaccaagacagtgctgaccggaaccaaagacgcagtgtccgctgggctcatggggtcagggaacgtggcgacaggggccacccacactggcctcagcaccttccagaactggttacctagtacccccgccacctcctggggtggactcaccagttccaggaccacagacaatggtggggagcagactgccctgagcccccaagaggccccgttctctggcatctccacgcccccggatgtgctcagtgtaggcccggagcctgcctgggaagccgcagccactaccaagggccttgcgactgacgtggcgacgttcacccaaggggccgccccaggcagggaggacacggggcttttgaccaccacacacggccccgaagaagccccacgcttggcaatgctgcagaatgagttggaggggctgggggacatcttccaccccatgaatgcggaggagcaagctcagctggctgcctcccagcccgggccaaaggtgctgtcggcggaacaggggagctacttcgttcgtttaggtgacctgggtcccagcttccgccagcgggcatttgaacacgcggtgagccacctgcagcacggccagttccaagccagggacactctggcccagctccaggactgcttcaggctgattgaaaaggcccagcaggctccagaagggcagccacgtctggaccagggctcaggtgccagtgcggaggacgctgctgtccaggaggagcgggatgccggggttctgtccagggtctgcggccttctccggcagctgcacacggcctacagtggcctggtctccagcctccagggcctgcccgccgagctccagcagccagtggggcgggcgcggcacagcctctgtgagctctatggcatcgtggcctcagctggctctgtagaggagctgcccgcagagcggctggtgcagagccgcgagggtgtgcaccaggcttggcaggggttagagcagctgctggagggcctacagcacaatcccccgctcagctggctggtagggcccttcgccttgcccgctggcgggcagtagctgtaggagcctgcaggcccggcgcggggtcgccctgctctgtccagggaggagctgcctcagaactttctccccgcccccaaacctggatcggttccctaaagccctagacctttggggctgcagctggctgagcgccgaggggctgcggaggcagtgaccttcttaactgagccaccccacgccctgctccgggcctgcctgcatctcccacctcctccccagcgctgcctgcccctctcggagcctggggtcactcagaccaccagccaagagccttcccttgaagtccccaagcaagcactgcaattaggaaagagaaaaagcagcgtgcccagcctggaagggcatctgtttgccccgctagcaacccttttatatctagcagggctcttccagtcctgcagcacgggcccccagctatcagcggtgcaggcagtgctgtggcatcccaggctccgggcagctccgttctcatgctgaaagtgggtctccggccttagcacacacaccttgagggtcttaagaaccacattccctcatagtagaaagtactagaaaaagcgacactgccatcatcatcccaaggcaggctgctactgcctttgctgacccccggggtggcctcacggtggggacaaagctgccaggagccacagcagccacagctggggctttgcaccagcctggcttgagactgagcagtttgcagggggtggggggtgcaaaaaacaagcaaacaggctgctgctgcctccagctgcccaccacaggcctgccccaggcacctggggctctgaggcccctggggaggctgggcccagcagctgcccctggagaacacagacaaaggacttccccgcagggaactgtgccctatggagggatcagacagggctgggaacagccacagaggctgcgtgcctatggcacagcccttcctccgccgcacactccccctgggtcctcaggcccacccaagcgccgggctgcagaggaagcggggctggggaggctgcaggcatcagagacactggtggtggcggacccggccgccgggccccgtgctctcaggctagcccaggtcgtggaggctggcaggctcaggtcgggtgtgagacgtgccgtggctgcgctcagtccagcggggaggagccgttcagcccggcctccccaggaagccatatccccactcacccggtaagagaaccttgtcgtcccctttccatgctctcctaggacacgagcccaggaaccccagacccagggggaggaagggtggaggggccccaggggtcaccatgtgcaccaggggccgtgaggggccggggcattcagctcagctctgaaccggggaagctggcacggcaaggactgcctcaggtgacgggccgtgagaggggacgggtcaggagccttcccaagccttctcctcagcccgacacccatggccatcggaggctaggatgccagacacagccatttgcagaaatcaggcacagtgactgcagctcacgtccagccaaccaagcatggggccgcagctcaggaagtcccttcccgccacaccacagcctaattcttactgggacggaggcaactcggctacgctgggcaggacgacaaacacgagacgccactgtggaatgagcaacttcggagcacggggtgacttgcttgggaccgtgcccacgtgacagccccttatgcagaggaggaaagagaagccccgagtgggaggggaacctgtccaaagtcacacggtgtgtgggtgacacagctggggtgagtcgaggctggcccctgaggcccatgctccctgaacgctggagaccactgtcggctagcagcggctctcagggaaggcctggtctccaccctcccagcctagcctcgcggaccctcgtcctccccacatcggacctgctcacctgcctggaccctgggctgccagatgcaggaagcatcaaaccccccagcctcgtgggtgcggggcagggcgcaggcagcacagcttagatgccctggtttgtccctcttgtctcctgggaagagcttgctcccgcccagctctcctgccactggcctttcagggttgggctgggcccagagtgccttttagtcgcttctcacggtggcctgatggctcaacccagtcccaaacgggcccagtgacactgccgactgcgccccagctcaggcccccactgcaccagcaatgctagaaaaccaagccaataaaagtgatttcttttttcatt

SEQ ID NO: 1782 - protein, 1348 aa, Homo sapien
GAKDLVCSKMSRAKDAVSSGVASVVDVAKGVVQGGLDTTRSALTGTKEAVSSGVTGAMDMAKGAVQGGLDTSKAVLTGTKDTVSTGLTGAVNVAKGTVQAGVDTTKTVLTGTKDTVTTGVMGAVNLAKGTVQTGVETSKAVLTGTKDAVSTGLTGAVNVARGSIQTGVDTSKTVLTGTKDTVCSGVTSAMNVAKGTIQTGVDTSKTVLTGTKDTVCSGVTGAMNVAKGTIQTGVDTSKTVLTGTKDTVCSGVTGAMNVAKGTIQTGVDTTKTVLTGTKNTVCSGVTGAVNLAKEAIQGGLDTTKSMVMGTKDTMSTGLTGAANVAKGAMQTGLNTTQNIATGTKDTVCSGVTGAMNLARGTIQTGVDTTKIVLTGTKDTVCSGVTGAANVAKGAVQGGLDTTKSVLTGTKDAVSTGLTGAVNVAKGTVQTGVDTTKTVLTGTKDTVCSGVTSAVNVAKGAVQGGLDTTKSVVIGTKDTMSTGLTGAANVAKGAVQTGVDTAKTVLTGTKDTVTTGLVGAVNVAKGTVQTGMDTTKTVLTGTKDTIYSGVTSAVNVAKGAVQTGLKTTQNIATGTKNTFGSGVTGAVNVAKGAVQTGVDTAKTVLTGTKDTVTTGLMGAVNVAKGTVQTSVDTTKTVLTGTKDTVCSGVTGAANVAKGAVQTGVDTAKTVLTGTKDTVCSGVTGAVNVAKGAVQTGLKTTQNIATGTKNTLGSGVTGAANVAKGAVQGGLDTTKSVLTGTKDAVSTGLTGAVNLAKGTVQTGMDTTKTVLTGTKDAVCSGVTGAANVAKGAVQTGVDTAKTVLTGTKDTVTTGLMGAVNVAKGTVQTSVDTTKTVLTGTKDTVCSGVTGAANVAKGAVQGGLDTTKSVLTGTKDTVSTGLTGAVNLAKGTVQTGVDTSKTVLTGTKDTVCSGVTGAVNVAKGTVQTGVDTAKTVLSGAKDAVTTGVTGAVNVAKGTVQTGVDASKAVLMGTKDTVFSGVTGAMSMAKGAVQGGLDTTKTVLTGTKDAVSAGLMGSGNVATGATHTGLSTFQNWLPSTPATSWGGLTSSRTTDNGGEQTALSPQEAPFSGISTPPDVLSVGPEPAWEAAATTKGLATDVATFTQGAAPGREDTGLLTTTHGPEEAPRLAMLQNELEGLGDIFHPMNAEEQAQLAASQPGPKVLSAEQGSYFVRLGDLGPSFRQRAFEHAVSHLQHGQFQARDTLAQLQDCFRLIEKAQQAPEGQPRLDQGSGASAEDAAVQEERDAGVLSRVCGLLRQLHTAYSGLVSSLQGLPAELQQPVGRARHSLCELYGIVASAGSVEELPAERLVQSREGVHQAWQGLEQLLEGLQHNPPLSWLVGPFALPAGGQ

SEQ ID NO: 1783 - DNA, 989 bp, Homo sapien
  Unsure 215-250, 255: Unknown base
cagaaagctttgggattacaggccatgagccaccatgccaagcccatacttattgttaataaagtttcagtgacttgcttactaatcttatgcaaaatttcatgtaatttatgtaatactacataacaatgctacatatggtatgtatacatacactgtatacacacaaaggtctgttctgggtattttatgtatcttatctccatttcagagcnnnnnnnnnnnnnnnnnnnnnnnnnnnnnnnnnnnnatttncatataagcccggtttaaagagaggataatatgcaaccaccctagttgaaacagagtgtatcacttctttctcaccctaaatttaatgcctagtttgaaaatcagtagacaataataaagttgataagctttaggttggtaggaaagctatgtaatctatatagtgtactaaatccttatatgtttttggtaaaaaaagactttaatagctaatttggacttcagaaaatgggttaatttcacgagtgcatatcacttttgactatattagtcaagcatattattaaagtttaaaaaactctaaaacttctgtactgtttttttcttaagtgctctcttccttatttctacattactacattcacatttctgctgtcaataagccctaatggagtgataaactttaagctagtagatactgcaccatgtcttgtggtggtgttttcttaatgaaatggaagctgtacttcctgtttgtttttaaatacttttgaaacagacagttcatgtaccccatcatttagagatgcagtttgaatttccatggaaaaaggtgccaattttggattgggaaaggagctgaagccccagtcaagactttgccatttggggtaatgcagcagattcctgtgtctgtatctttccagtgtgtgtgttaatccatagtgttctgagcaccagaagggtcatgtaaatctgaagttgttattaaaggtttttctatagtgaaaaaa

SEQ ID NO: 1784 - protein, 41 aa, Homo sapien
  Unsure 215-250, 255: Unknown amino acid
QKALGLQAMSHHAKPILIVNKVSVTCLLILCKISCNLCNTT

SEQ ID NO: 1785 - DNA, 1287 bp, Homo sapien
  Unsure 1282: Unknown base
gaattcggcacgagatttactaaaatgatgtaataaataacatgttaatagactcaagctttaccttatgaaattgatgtatttttaccagttatttctaatgtaacattgaatatataagatctgacaaatgtatgtttaaacatgaattagaagagttgagaactaccattatgtatagggattctcatagtgtcttggcccttaattggaaagttgtggcaactttaaagtactttttactgtatgttataattctttataacttagagagagacaatggtcactcaaactatgagaactatgaattaggagataaaagtttaaatttgttgttgttttataacagtatgtacaagttagttttcccttatatatttacgttttcaagttttttaatctcatcatatacatccatactctataaaatgttttatattcaaagaactgtaaaatcctaaacattagttttcactattgaaattgttttttaaagataggcataaatagttgtccttagacttattcatacaaatatagtcatttacttctatgtagtttgagattctgagagttattccaactttatgaagattgatttcaatgtgcctgctaagtcctaaaagattcagaaagaaaatttatatattattgatttaaatatcatcctttaaatatgttgtataacattcaatatagtttatgtatcagtgattgtattttattctgaatgcatgatctcaagccttaactactataatctttttctgcccctcagaaattgaataacctaaccaagatgcctttaggggatgccctaagtaaatgtaatttcagatttcagggttttttttttttcctctctaagtgttccttccctttcttctcctgctctccatcatgttatggagaccagtgaggaaccagtgttaacttggtgacaatgtgacagctggtgctttatctaagctccgttttctatttcttgggaatgctttattgtggaaactgcttcagatacttaaattgaatcataacttgcttctgtaaattgcgtaaagacaacaaactgattttagtttgaaaagtttatcttttacttgtaaaccttgtttgccagttaccttccgaaagctgtgtaaagagttatttttaacaaagtcttaacaatatatgttactttttagatactatagaaaataataaatataacctgtaaaccacaaaaaaaaaaaaaaaaaaactcgagggggggcccggtacccaatcgcsgwgtgatggngctat

SEQ ID NO: 1786 - protein, 95 aa, Homo sapien
  Unsure 1282: Unknown amino acid
MYRDSHSVLALNWKVVATLKYFLLYVIILYNLERDNGHSNYENYELGDKSLNLLLFYNSMYKLVFPYIFTFSSFLISSYTSILYKMFYIQRTVKS

SEQ ID NO: 1787 - DNA, 376 bp, Homo sapien
ttaatatacaatttttatttgtcaattagaaagtaacaataaagagtgagcttataagttatggagttaaaattttatgcagaagcaagggaaaatcttcctccagtgaaaaaattctaatgagattttgaagacagaaacaaatcacattttttttgtttttgttttctaaatgttttacaagagaaaatttcaaaagcataatcagtaagagggagaaaagtgtgctgaattccatgtatccagcttgcagccattgttaactcaggactaatcttgtttcggttctacttccctttcaccacccccacaccccaaacacaaaattactgattctagatcatgtcatttatttacaaatactttagtatgtatc

SEQ ID NO: 1788 - DNA, 3156 bp, Homo sapien
cactctgtctcacaaaaaaataaaaaaattaaaaaaaaaggtctgctcagaaataggggaaacacgggatcaagatcattagagatttataggctgggatgcacaccatgtcttcagagctagccggctgtgtcttctgcccgtttctttcactggtgaataacctttcgtttgaaccagcattgattgttctctccatgttccactgtggctccccatggacactgctaggtggaatctctgagaaaacaggcacttcgcagtcggcgcatctttctctgccagcttagggattgccgtcaaggtggaggaagggtattttggccatgttcggagtcgttgtttttactcactcttcttgggatagctttcccaccctgccctctgctcctctgtcccaaccctcttccagcctggtttttttactgcttgaattatgtatccaaaataaaaaggaaaagaaaggtgcagttggggcgggttgttgggggcgaggagaatagcccttctggttcttcagaccacataatggccagagcatgagcctcacagatccctgagcagacctgcatactagcactttccacaaccagctggccctggctgtgagagtcagatctgtccccaaggctccaggtcagaacttggacccaggtgccttctgaggcaccgccaaggacacatcccagcgccttaggcacctgtaggctagaatgacaccttccaggccagccccagaggccctcagggctccccctccaagccgggagggcaggcaggcacaggccccgctcactacctcagcacccagtgcagccccaggctcccggacgtgctcggcccggtggcctcttgtgtgacaggccctctgccatgtctgtccgcagagccgggtggggagcctccgtgtgggtcctcctctgtccctttgcagctcgcattcgccagagcggagcgcagcccttgtttccttctttcctcttcagctctgacttaaaaacacactatgttccaaatcgttgtgggatcggaaactagaactgcttgtttccaggagagaccaccttttcatattttttttaaaaggaatttgtgcttcaaaagaaactccaaaaaataaatttattgttagtctagcatatgctcattgaaattgacttatgttttattttaaaaaatcatgtaggatctggtacatggggcgggcaaaagggtatcatcagcttaagaagtaaagaagtgagccttccatttgtgtgggtgataacatctttttcctagatcgtacctcaaaattcaggctctccatgaaaacaaagataatctgaataaaaattgtgtgttgggaaatgtatcaagtgaccttcagttaagaaaagcacaggctgtttattagcacaacttgcttcattaaataattcgtggctttttctgccactggggttcttttcgttttgaattcagcttgtgtttggttcctcggtcttgtaccccttcagttcgccggcgacgtaatggtgataccctttgttttttgtatcacaccttttgtgaattgtgacaaccatcccgtaatcattgtggcctcagcagaagttttgaacaatctttgcagccactgttggggtgtgtaccagcagcctggaagtgaccagcagagctgacaaaagcaccccctgctctgcccacctccgcagagtcctgtcctcatcagaaacggtatcgcggatgctcctcaggtaggcgtaggcagacttcattgtgtgttagcagtgacagtgatgtctgtacctatctgtgagtgagacccattcatgacacactagaaatgtgtacattcttttgttttccatcacgggtataggtcttctgccatgaaagagaactatcaaggaaattcctgaaaacaagatttgtaaattcgatttgaccctcccaaattcagggctgctctttgcagtggtccctggcccagcaggtggccggcgtggctcctgttggctcatgccagtgttgtgctggaccctcgagtatgtgactgtcacccttgtccaagactggtttttaacagtcttgatttgtcattttgatgctttgaatactataaggaaaatgccacgaataccatataaataccacaccaatctgttgaacatatctgtgttttctgacatgggacctgcagaatagtatttcttttaaatcctgcaactttattatctagtagaattccaagtaggtctgcttagacacatattcagtgaagattgtattgtgtgtgatattatcctatctttaataaagtcctactactgaaaaacagggatttgcaatgaaaatcatagctaaataggcaggtttagaaagttcaaaatattggaagtgctagaaggctgcaacttgtaaaattgtactccccaagttcagtaggatagtagagaagtcgtgctaagttgatttcattgaaatgtcacgtctcacatcctgtggtccaaaggtactagtttgttttgtggaataattttctgttcacttgctgataagaaatttagcagtcagaagtaatttttaattaataacctttctttttaaaagttgctttatggtttacaagtaatactgatgcaaaaaggatttgttaacctaaattaagtagcacgcactttgtttacatgcttcagtatattgtggggttggtcccttctcacgaacccaggacctgtgcttggggaacattttgccatcatgctgttctcttgtaccaaggatcagtgaaagtgttttatcttttttatgtagtttgtattgactggattttataactgtaagaaaacagaaacagagtgttgtattttgatctgaaatttgtgtatgctaaagtaattttgttttatgtattggaagttcacttaaaaacttgaaatattttctagaagggtaccacacaaaaggaatcatctttaagctgtttaattaacctaataaaataatttgatggggaaggcattctaattgtttctgatttttagagtggttcctgctaaatcatcattatcaatacagcttgatttgatttaagaatgaaaaaaaatctatgtcgggtgcggagaaagaggtaatgaaatggcaggatatcgatatcaagcttatcatacc

SEQ ID NO: 1789 - protein, 40 aa, Homo sapien
HSVSQKNKKIKKKGLLRNRGNTGSRSLEIYRLGCTPCLQS

SEQ ID NO: 1790 - DNA, 347 bp, Homo sapien
tgaggatcaaaaaactacctatctggtactatgctttttatctggatgatgaaataatctgtacaacaaaccctggtgacatgcaatttacctatatagcaagcctacacatgtgcccctgaacctaaaaaaaaagttaaaagaaaaacgtttggattattttccctctttcgaacaaagacattggtttgcccaaggactacaaataaaccaacgggaaaaaagaaaggttccagttttgtctgaaaattctgattaagcctctgggccctacagcctggagaacctggagaatcctacacccacagaacccggctttgtccccaaagaataaaaacacctctctg

SEQ ID NO: 1791 - protein, 39 aa, Homo sapien
RIKKLPIWYYAFYLDDEIICTTNPGDMQFTYIASLHMCP

SEQ ID NO: 1792 - DNA, 1637 bp, Homo sapien
  Unsure 774, 779: Unknown base
ctgtcattggactgatttgcccagatgacatcaattgggaatttgaggcatgacctataaagatcagttgcttgcaagagtctcaggaaaataattgtggagttaagaaacttgaagcgatttttaaaaaaattacctaaacccaaccttctcatttgaaaaattaaaaaataaataggccagatatggcagctcatgcctgtaatcccagcgctgtgggagcctgaggcgggtgggtctcttgaggccagagttcaagaccagcctgacaacatggtgaaaccctgtctctactaaaaacacaaaaattagctgagtgtggtggcaggcgcctgtaatcccagctactcaggaggctaaggtgggaggattacttgaaccggggaggcataggttgtcagtgagccaagatcgtgtcactgcactccagcctgggtgacagagtaagactctgcctaaaaaaaaaaaagaaagattaaaaaataaataaatctgctgggcgtggtggctcacgcctgtaatcccgcactttgggaggccgaggcgggcggatcacctgaggtcgggagtttgagaccagcctgatcaacatggagaaacctcgtctctactaaaaacacgaaaaaattagctgggcgtggtggcgcatgcctcattcacgtacatgggagagtctacaaagtcacacgtattcataggttaagccacatgctgacaaatgtcataagaagaccctacacttttaccttggccgatccctcccctcagtgcaanctctntgcaagagtgaacttgaacttcactcagtgcaagagtgaacacacactttgtgccggctttaaagaacccagcacaaagccagtctgcatggcctacagacatattttgctggacaatgattacttgcttttctttttgtttttcttgtatttgcctgtttgattggctcctgacataccagaaaatcactgtcaaaacattagcttaacatttgttaaggaaacaaaaagacttcggtgaccacaccttataaaccaaacagttttgtaaatcactttggaaaatttcactaaaaaaaaaaatccttaacaatataataagtaaagaaaatttaaaaccacaaaacatcactgtgtttgtagggggaggctgatttacagtgaaccacatagtaattataattattagaatgtcagttttcaaaacgttacaacggacatacaaagaatgggaaagtgtggactcttcaaaggaacaaaataaagtgacagaaaatatccctaaagaaacccagacatcaaacttaccagacaaagactttaaaacaactgtcttcattatactcaaatgtcaaaaggaaaacataaacaaagaaataaaggaatcagaaaaaatattaaaaagtaggaatatcagcaaagagataacaaattctggagtggaaaactacaatgataaaaatttaaaaatcaccagagggatttaagagtatatttgcacacacagaggaagccatgaacttgaagagaagaaaatggaaaatactctgagaaacagaaagaataaaaaataaacaatgagcagagactaatgaatctgtgggacatcatcaaatagaccaacattcatattctaga

SEQ ID NO: 1793 - DNA, 1801 bp, Homo sapien
gcagagctaccatgtcctcttggagcagacagcgaccaaaaagcccagggggcattcaaccccatgtttctagaactctgttcctgctgctgctgttggcagcctcagcctggggggtcaccctgagccccaaagactgccaggtgttccgctcagaccatggcagctccatctcctgtcaaccacctgccgaaatccccggctacctgccagccgacaccgtgcacctggccgtggaattcttcaacctgacccacctgccagccaacctcctccagggcgcctctaagctccaagaattgcacctctccagcaatgggctggaaagcctctcgcccgaattcctgcggccagtgccgcagctgagggtgctggatctaacccgaaacgccctgaccgggctgcccccgggcctcttccaggcctcagccaccctggacaccctggtattgaaagaaaaccagctggaggtcctggaggtctcgtggctacacggcctgaaagctctggggcatctggacctgtctgggaaccgcctccggaaactgccccccgggctgctggccaacttcaccctcctgcgcacccttgaccttggggagaaccagttggagaccttgccacctgacctcctgaggggtccgctgcaattagaacggctacatctagaaggcaacaaattgcaagtactgggaaaagatctcctcttgccgcagccggacctgcgctacctcttcctgaacggcaacaagctggccagggtggcagccggtgccttccagggcctgcggcagctggacatgctggacctctccaataactcactggccagcgtgcccgaggggctctgggcatccctagggcagccaaactgggacatgcgggatggcttcgacatctccggcaacccctggatctgtgaccagaacctgagcgacctctatcgttggcttcaggcccaaaaagacaagatgttttcccagaatgacacgcgctgtgctgggcctgaagccgtgaagggccagacgctcctggcagtggccaagtcccagtgagaccaggggcttgggttgagggtggggggtctggtagaacactgcaacccgcttaacaaataatcctgcctttggccgggtgcgggggctcacgcctgtaatcccagcactttgggaggcccaggtgggcggatcacgaagtcaggagatcgagaccatcttggctaacatggtgaaaccctgtctctactaaaaatataaaaaattagccaggcgtggtggtgggcacctgtagtcccagcaactcgggaggctgaggcaggagaatggcgtgaacttgggaggcggagcttgcggtgagccaagatcgtgccactgcactctagcctgggcgacagagcaagactgtctcaaaaaaattaaaattaaaattaaaaacaaataatcctgccttttacaggtgaaactcggggctgtccatagcggctgggaccccgtttcatccatccatgcttcctagaacacacgatgggctttccttacccatgcccaaggtgtgccctccgtctggaatgccgttccctgtttcccagatctcttgaactctgggttctcccagccccttgtccttccttccagctgagccctggccacactggggctgcctttctctgactctgtcttccccaagtcagggggctctctgagtgcagggtctgatgctgagtcccacttagcttggggtcagaaccaaggggtttaataaataacccttgaaaactggaaaaaaaaaaaaaaaaaaaaaa

SEQ ID NO: 1794 - protein, 347 aa, Homo sapien
MSSWSRQRPKSPGGIQPHVSRTLFLLLLLAASAWGVTLSPKDCQVFRSDHGSSISCQPPAEIPGYLPADTVHLAVEFFNLTHLPANLLQGASKLQELHLSSNGLESLSPEFLRPVPQLRVLDLTRNALTGLPPGLFQASATLDTLVLKENQLEVLEVSWLHGLKALGHLDLSGNRLRKLPPGLLANFTLLRTLDLGENQLETLPPDLLRGPLQLERLHLEGNKLQVLGKDLLLPQPDLRYLFLNGNKLARVAAGAFQGLRQLDMLDLSNNSLASVPEGLWASLGQPNWDMRDGFDISGNPWICDQNLSDLYRWLQAQKDKMFSQNDTRCAGPEAVKGQTLLAVAKSQ

SEQ ID NO: 1795 - DNA, 2706 bp, Homo sapien
  Unsure 1422-1759: Unknown base
ccacgaggggccggctggtggtggcagccccggaggctgggcagggcagtgccgggggagtactcacccctgccctgcccagcctccggggctgctaccacgaggggccggctggtggtggcggcggcggcaccccgagcagtgtggacacgtacccgtacgggctgcccacacctcctgaaatgtctcccctggacgtgctggagccggagcagaccttcttctcctccccctgccaggaggagcatggccatccccgccgcatcccccacctgccagggcacccgtactcaccggagtacgccccaagccctctccactgtagccaccccctgggctccctggcccttggccagtcccccggcgtctccatgatgtcccctgtacccggctgtcccccatctcctgcctattactccccggccacctaccacccactccactccaacctccaagcccacctgggccagctttccccgcctcctgagcaccctggcttcgacgccctggatcaactgagccaggtggaactcctgggggacatggatcgcaatgaattcgaccagtatttgaacactcctggccacccagactccgccacaggggccatggccctcagtgggcatgttccggtctcccaggtgacaccaacgggtcccacagagaccagcctcatctccgtcctggctgatgccacggccacgtactacaacagctacagtgtgtcatagagctggaggcgccccgtccggtcagccctcgcgccctctccttcctgtgccttgagtggcagaggagccgtccagccacaccagctttcctcccaccgctcagggcagggaggtctgaactgcggccccagagcctttggcctaagctggactctccttatccgagtgccgcctctatccccttccccacgttccagcccctgcagcccacattttaagtatattccttcaagtgagttttcctccagcccctgagagttgctgtctcccagtggaatgttcactgacgtcttttcttggtagccatcatcgaaactaatggggggacagacttgatagccaaggtcccttctggtccagttttctgatttagggttctctcaagattaataaaggaagatggggaaatttgactcattaatgagctcgctaacctacgatctggtgataattttgtgtgcacagcccaaggaccacgaggctttctgcactttctgcacccccttccaaagtgaccacaaaatttcaaagggactcatacaatttgagaaaaaacagtcaacctgatttgagaaattaaccagtatggctaactatatcacagaaaatgggattgagttaaaactattttattttaaatatacattttaaagcagttctttttttttgttaatttgtttattatacacannnnnnnnnnnnnnnnnnnnnnnnnnnnnnnnnnnnnnnnnnnnnnnnnnnnnnnnnnnnnnnnnnnnnnnnnnnnnnnnnnnnnnnnnnnnnnnnnnnnnnnnnnnnnnnnnnnnnnnnnnnnnnnnnnnnnnnnnnnnnnnnnnnnnnnnnnnnnnnnnnnnnnnnnnnnnnnnnnnnnnnnnnnnnnnnnnnnnnnnnnnnnnnnnnnnnnnnnnnnnnnnnnnnnnnnnnnnnnnnnnnnnnnnnnnnnnnnnnnnnnnnnnnnnnnnnnnnnnnnnnnnnnnnnnnnnnnnnnnnnnnnnnnnnnnnnnnnnnnnnnnnnnnnnnnnnnnnnntctggaatggtgttaccaggagtgtgagagacacatgcccacttcatgcaactcctaaactcaaagtctaaatcagatatttttattaacaatgacaacttgttgccaactccctgtttctaatcaccaaagacccagggtacctaaaaggactttgcaaccaagcaaagtcactgtcttcaaatctggatacacactttcccctctgtagattcaaaaggtgcttccttcccggctgtctccagcttccttactctcttttctgggatttctttttctcttctttctgctcttcctccactgctgaactggtccctaactgaaacagcccctgacttagcccaagcatgcttcctttagctgctgtgagaatttgtcttcctcaccagccaggtcctcaggcaaagtcctcagccagtgctttagagcaacttcccgcaaatcagaaactcactgtgattccaaaaatgtttctgagccctggacccctgcccccaaaatattttcatctttcccccaaacctcctttaaaggagcatgcataacagtgtgctgaaagacagttgttggttttttgattttagcatattatttcctgtatgaaatatgttttatataatctcctattatttttatcttatgttttgtattgttgataaatcctttttgtccttctaagatgtcctattgtaaaatcacttataaggtatgattactctttatgctattactttatatgccatttggtaataaatagtaaattgttgatgatatgattgactgatgcgcagtccagagcatgtatgaataatctcataaaacagtatcacagacattaagctaaactgtttcgtttttttgaaagaacaactcatactttggaacagttgtcaatattaatttgttgcaaatatttaatttaaataaacatttttgtaccatgaaaa

SEQ ID NO: 1796 - protein, 242 aa, Homo sapien
  Unsure 1422-1759: Unknown amino acid
TRGRLVVAAPEAGQGSAGGVLTPALPSLRGCYHEGPAGGGGGGTPSSVDTYPYGLPTPPEMSPLDVLEPEQTFFSSPCQEEHGHPRRIPHLPGHPYSPEYAPSPLHCSHPLGSLALGQSPGVSMMSPVPGCPPSPAYYSPATYHPLHSNLQAHLGQLSPPPEHPGFDALDQLSQVELLGDMDRNEFDQYLNTPGHPDSATGAMALSGHVPVSQVTPTGPTETSLISVLADATATYYNSYSVS

SEQ ID NO: 1797 - DNA, 2101 bp, Homo sapien
ggagggttttgctctttgtgtgggtgtgtgagtggctatgatcctagttgtccagctgctgcgtggagaataagtaaagcaggtctgaatgacaccaggtcgctgctgtcttgcggctgacattcaggtagagacgttcatcttcactgacggggaagatgaggccctggccaggcacacgggcaacgtggtcatcacaaactgctcggccgcccacagccgccaggcgctgtcctgcaagatggccgtggagtatgaccgcttcatcgagtccggcaggaagtggttctgccacgtggacgatgacaactacgtcaacctgcgggccctgctgcggctgctggccagctacccgcacacgcgggacgtctacgtcggcaagcccagcctggacaggcccatccaggccatggagcgggtcagcgagaacaaggtgcgtcctgtccacttctggtttgccacgggcggcgctggcttctgcatcagccgtgggctggctctgaagatgagcccgtgggccagcgggggtcacttcatgaatacggctgagcggatccggctgcctgatgactgcaccatcggctacatcgtggaggccctgctgggtgtgcccctcatccgcagcggcctcttccactcccacctggagaacctgcagcaggtgcccacctcggagctccacgagcaggtgacgctgagctacggtatgtttgaaaacaagcggaacgccgtccacgtgaaggggcccttctcggtggaggccgacccatccaggttccgctccatccactgccacctgtacccggacacaccctggtgtccccgcactgccatcttctagtggccatggctgagacccaatccctgggcgcccctggtatccaaagggcccagggaccctgttgcgctgccctggcctcggcattcgaggctcccctagggccgtgcctgtgcgtgtgcgtgtgcatgtgcgtgtgtgtgtgtgtgtactgcatgcccacccgggtagcaggctgctgggcagttctgctctgtggaggggcgggcaccagcgccacttatgtgcctctgctccgagggccagtgggctgcagggcctgcttggaggaaggatttgtgtgtcggaggccactccgagggcaattctgttaggatttttggatctttctacagctacggggctccgggctactttgcagggatgcgatgcgtaggtgcctttctcttcctgctgaccacaagctctgtgctgggggtacctgtgccctgaagtcctggcccctgtgtcatagccccaagtacgactcactgagccatgctcattgcaggggaggctgggtctgggggtgcgtgacccaatccccttcctcctggcctggacgctgtggcttaagagtaacagcagccaccgcccagttccagtggccccacgaagcccccagtggctggctgtccagctgggcaaacagtggcacccctcccagctcttctgagtggggagtcttccaggcctcctcagaggtcttccctttgcctccccaggacagggtgagtcagagctcagcatttaatctcctctccaaagtagagagcaagtcgcccacagtgggcgtgtctgtaaatattgtgacagtatttttttactgtgctgttttttttgaaaggggatgggtaaaaagtagggtgttcttgttttttgcttgggagggtgggggtgggggagggtcttattttatcttatcttttctgtggatcagaaaaaacagaagccaaactcggggtcatctttgtttttaaagctgaagtgggactgtctggcactctgtgtatttatgcgttccagcatctggaacctcccatccctgccctcctcctgtgtagctgccacctccccgctgggcccagcatggctcacctgtcccgtgggctgtgtttcttgttgtttttctctttgcaaagacatagctaggaaagcgaatgataagggaaaagttctcagggaattgaagtgttgttgctatggtgacgtccttttgctgtgaataaaggtgctctttgcagcaaaaaaaaaaaaaaaaaaaaaaaaaaaaaaaaaaaaaaa

SEQ ID NO: 1798 - protein, 250 aa, Homo sapien
MTPGRCCLAADIQVETFIFTDGEDEALARHTGNVVITNCSAAHSRQALSCKMAVEYDRFIESGRKWFCHVDDDNYVNLRALLRLLASYPHTRDVYVGKPSLDRPIQAMERVSENKVRPVHFWFATGGAGFCISRGLALKMSPWASGGHFMNTAERIRLPDDCTIGYIVEALLGVPLIRSGLFHSHLENLQQVPTSELHEQVTLSYGMFENKRNAVHVKGPFSVEADPSRFRSIHCHLYPDTPWCPRTAIF

SEQ ID NO: 1799 - DNA, 966 bp, Homo sapien
ggcagtggaaccttcgggctcctgagcttcaggatggttcgtactaagacatggaccctgaagaagcactttgttggctatcctactaatagtgactttgagttgaagacagctgagctcccacccttaaaaaatggagaggtcctgcttgaagctttgttcctcaccgtggatccctacatgagagtggcagccaaaagattgaaggaaggtgatacaatgatggggcagcaagtggccaaagttgtggaaagtaaaaatgtagccctaccaaaaggaactattgtactggcttctccaggctggacaacgcactccatttctgatgggaaagatctggaaaagctgctgacagagtggccagacacaataccactgtctttggctctggggacagttggcatgccaggcctgactgcctactttggcctacttgaaatctgtggtgtgaagggtggagaaacagtgatggttaatgcagcagctggagctgtgggctcagtcgtggggcagattgcaaagctcaagggctgcaaagttgttggagcagtagggtctgatgaaaaggttgcctaccttcaaaagcttggatttgatgtcgtctttaactacaagacggtagagtctttggaagaaaccttgaagaaagcgtctcctgatggttatgattgttattttgataatgtaggtggagagttttcaaacactgttatcggccagatgaagaaatttggaaggattgccatatgtggagccatctctacatataacagaaccggcccacttcccccaggcccacccccagagattgttatctatcaggagcttcgcatggaagcttttgtcgtctaccgctggcaaggagatgcccgccaaaaagctctgaaggacttgctgaaatgggtcttagagggtaaaatccagtacaaggaatatatcattgaaggatttgaaaacatgccccgg

SEQ ID NO: 1800 - protein, 311 aa, Homo sapien
MVRTKTWTLKKHFVGYPTNSDFELKTAELPPLKNGEVLLEALFLTVDPYMRVAAKRLKEGDTMMGQQVAKVVESKNVALPKGTIVLASPGWTTHSISDGKDLEKLLTEWPDTIPLSLALGTVGMPGLTAYFGLLEICGVKGGETVMVNAAAGAVGSVVGQIAKLKGCKVVGAVGSDEKVAYLQKLGFDVVFNYKTVESLEETLKKASPDGYDCYFDNVGGEFSNTVIGQMKKFGRIAICGAISTYNRTGPLPPGPPPEIVIYQELRMEAFVVYRWQGDARQKALKDLLKWVLEGKIQYKEYIIEGFENMPR

SEQ ID NO: 1801 - DNA, 749 bp, Homo sapien
cggtgactgagcaaccctagtgacaggagccgaagcagcagcgcaggttgtccccgtttcccctcccccttcccttctccggttgccttcccgggccccttacactccacagtcccggtcccgccatgtcccagaaacaagaagaagagaaccctgcggaggagaccggcgaggagaagcaggacacgcaggagaaagaaggtattctgcctgagagagctgaagaggcaaagctaaaggccaaatacccaagcctaggacaaaagcctggaggctccgacttcctcatgaagagactccagaaagggcaaaagtactttgactcaggagactacaacatggccaaagccaagatgaagaataagcagctgccaagtgcaggaccagacaagaacctggtgactggtgatcacatccccaccccacaggatctgccccagagaaagtcctcgctcgtcaccagcaagcttgcgggtggccaagttgaatgatgctgcccggggctctgccagatcctgagacgcttcccctccctgccccacccgggtcctgtgctggctcctgccccttcctgcttttgcagccaggggtcaggaggtggctcgggtgtgggctggagaggcagaagccctttcctgttggtgtcccagcacatggaccccttgggctgagcaccaagaccttgaaccttttttgttttaccttttttccaaataacagttgggagaaatatcaatgaaattctgccg

SEQ ID NO: 1802 - protein, 121 aa, Homo sapien
MSQKQEEENPAEETGEEKQDTQEKEGILPERAEEAKLKAKYPSLGQKPGGSDFLMKRLQKGQKYFDSGDYNMAKAKMKNKQLPSAGPDKNLVTGDHIPTPQDLPQRKSSLVTSKLAGGQVE

SEQ ID NO: 1803 - DNA, 770 bp, Homo sapien
gttaacttgctgtatacctcagtgtaatgtccgttcaaggagtattaaatgaggatttccctgcgaggacatttactgtattgctacttaaattatggaagacaatatatcttcaactttaataaaacctattcagaaaattaccaattcagaattcggagttcttatccaggtgctctaactaacttcagggaaattggaacaataagttatgttacatgcacactcaaattctttattttctccactttaagcaggaaagggtaaaaactgttttggtactcaagcccagccttacatactgtgtttctctctctgtctgcatgcatattaaagtggaaaaattgtatttatatcttagttattaccatagtacctatgaaccttatcaaaattgcttatttgactggtgttacagctgctattaatctaagtctattgtttttctattttagtagataatttagttttaaaatacgtagggtttgagagcagatatatttatttaatctgttttctctagtaactattgctgaagggttaggcattcagtattcctatttgtcctaattttgaagttaaaaattttggttacagatagatagagggagaaaagttcaaaatgagtgagagagaactttatgcaggttgagataatgcctaaaataatgagctggccagactgtggaggtactctttgtattttgtaacattgactttgggtaaatgctttttcactgttaataaatatatatcctgtatacaaaaat

SEQ ID NO: 1804 - protein, 72 aa, Homo sapien
MRISLRGHLLYCYLNYGRQYIFNFNKTYSENYQFRIRSSYPGALTNFREIGTISYVTCTLKFFIFSTLSRKG

SEQ ID NO: 1805 - DNA, 5142 bp, Homo sapien
  Unsure 3712-3747, 4297-4326: Unknown base
gtgctgccgtgacactcggccctccagtgttgcggagaggcaagagcagcgaccgcggcacctgtccgcccggagctgggacgcgggcgcccgggcggccggacgaagcgaggagggaccgccgaggtgcgcgtctgtgcggctcagcctggcgggggacgcggggagaatgtggactgggtagagatgaacgagacttttctcagatgttggatatttgcttggaaaaacgtgtgggtacgaccttggctgcccccaagtgtaactccagcactgtgaggtttcagggattggcagaggggaccaaggggaccatgaaaatggacatggaggatgcggatatgactctgtggacagaggctgagtttgaagagaagtgtacatacattgtgaacgaccacccctgggattctggtgctgatggcggtacttcggttcaggcggaggcatccttaccaaggaatctgcttttcaagtatgccaccaacagtgaagaggttattggagtgatgagtaaagaatacataccaaagggcacacgttttggacccctaataggtgaaatctacaccaatgacacagttcctaagaacgccaacaggaaatatttttggaggatctattccagaggggagcttcaccacttcattgacggctttaatgaagagaaaagcaactggatgcgctatgtgaatccagcacactctccccgggagcaaaacctggctgcgtgtcagaacgggatgaacatctacttctacaccattaagcccatccctgccaaccaggaacttcttgtgtggtattgtcgggactttgcagaaaggcttcactacccttatcccggagagctgacaatgatgaatctcacacaaacacagagcagtctaaagcaaccgagcactgagaaaaatgaactctgcccaaagaatgtcccaaagagagagtacagcgtgaaagaaatcctaaaattggactccacccctccaaggaaaggacctctaccgttctaacatttcacccctcacatcagaaaaggacctcgatgactttagaagacgtgggagccccgaaatgcccttctaccctcgggtcgtttaccccatccgggcccctctgccagaagactttttgaaagcttccctggcctacgggatcgagagacccacgtacatcactcgctcccccattccatcctccaccactccaagcccctctgcaagaagcagccccgaccaaagcctcaagagctccagccctcacagcagccctgggaatacggtgtcccctgtgggccccggctctcaagagcaccgggactcctacgcttacttgaacgcgtcctacggcacggaaggtttgggctcctaccctggctacgcacccctgccccacctcccgccagctttcatcccctcgtacaacgctcactaccccaagttcctcttgcccccctacggcatgaattgtaatggcctgagcgctgtgagcagcatgaatggcatcaacaactttggcctcttcccgaggctgtgccctgtctacagcaatctcctcggtgggggcagcctgccccaccccatgctcaaccccacttctctcccgagctcgctgccctcagatggagcccggaggttgctccagccggagcatcccagggaggtgcttgtcccggcgccccacagtgccttctcctttaccggggccgccgccagcatgaaggacaaggcctgtagccccacaagcgggtctcccacggcgggaacagccgccacggcagaacatgtggtgcagcccaaagctacctcagcagcgatggcagcccccagcagcgacgaagccatgaatctcattaaaaacaaaagaaacatgaccggctacaagacccttccctacccgctgaagaagcagaacggcaagatcaagtacgaatgcaacgtttgcgccaagactttcggccagctctccaatctgaaggtccacctgagagtgcacagtggagaacggcctttcaaatgtcagacttgcaacaagggctttactcagctcgcccacctgcagaaacactacctggtacacacgggagaaaagccacatgaatgccaggtctgccacaagagatttagcagcaccagcaatctcaagacccacctgcgactccattctggagagaaaccataccaatgcaaggtgtgccctgccaagttcacccagtttgtgcacctgaaactgcacaagcgtctgcacacccgggagcggccccacaagtgctcccagtgccacaagaactacatccatctctgtagcctcaaggttcacctgaaagggaactgcgctgcggccccggcgcctgggctgcccttggaagatctgacccgaatcaatgaagaaatcgagaagtttgacatcagtgacaatgctgaccggctcgaggacgtggaggatgacatcagtgtgatctctgtagtggagaaggaaattctggccgtggtcagaaaagagaaagaagaaactggcctgaaagtgtctttgcaaagaaacatggggaatggactcctctcctcagggtgcagcctttatgagtcatcagatctacccctcatgaagttgcctcccagcaacccactacctctggtacctgtaaaggtcaaacaagaaacagttgaaccaatggatccttaagattttcagaaaacacttattttgtttcttaagttatgacttggtgagtcagggtgcctgtaggaagtggcttgtacataatcccagctctgcaaagctctctcgacagcaaatggtttcccctcacctctggaattaaagaaggaactccaaagttactgaaatctcagggcatgaacaaggcaaaggccatatatatatatatatatatatatatatatctgtatacatattatatatacttatttacacctgtgtctatatatttgcccctgtgtattttgaatatttgtgtggacatgtttgcatagccttcccattactaagactattacctagtcataattattttttcaatgataatccttcataatttattatacaatttatcattcagaaagcaataattaaaaaagtttacaatgactggaaagattccttgtaatttgagtataaatgtatttttgtcttgtggccattctttgtagataatttctgcacatctgtataagtacctaagatttagttaaacaaatatatgacttcagtcaacctctctctctaataatggtttgaaaatgaggtttgggtaattgccaatgttggacagttgatgtgttcattcctgggatcctatcatttgaacagcattgtacataacttgggggtatgtgtgcaggattacccaagaataacttaagtagaagaaacaagaaagggaatcttgtatatttttgttgatagttcatgtttttcccccagccacaattttaccggaagggtgacaggaaggctttaccaacctgtctctccctccaaaagagcagaatcctcccaccgccctgccctccccaccgagtcctgtggccattcagagcggccacatgacttttgcatccattgtattatcagaaaatgtgaagaagaaaaaaatgccatgttttaaaaccactgcgaaaatttccccaaagcataggtggctttgtgtgtgtgcgatttgggggcttgagtctgggtggtgttttgttgnnnnnnnnnnnnnnnnnnnnnnnnnnnnnnnnnnnnaatgtcaaaattgcacaaacatggtgctctaccaggaaggattcgaggtagataggctcaggccacactttaaaaacaaacacacaaacaacaaaaaacgggtattctagtcatcttggggtaaaagcgggtaatgaacattcctatccccaacacatcaattgtattttttctgtaaaactcagattttcctcagtatttgtgtttttacattttatggttaatttaatggaagatgaaagggcattgcaaagttgttcaacaacagttacctcattgagtgtgtccagtagtgcaggaaatgatgtcttatctaatgatttgcttctctagaggagaaaccgagtaaatgtgctccagcaagatagactttgtgttattctatcttttattctgctaagcccaaagattacatgttggtgttcaaagtgtagcaaaaaatgatgtatatttataaatctatttataccactatatcatatgtatatatatttataaccacttaaattgtgagccaagccatgtaaaagatctactttttctaagggcnnnnnnnnnnnnnnnnnnnnnnnnnnnnnnctcctttctgagactttgcttaatacttggtgacctcacaatcacgtcggtatgattgggcacccttgcctactgtaagagaccctaaaaccttggtgcagtggtggggaccacaaaacaaccagggaggaagagatacatcattttttagtattaaggaccatctaagacagctctattttttttttgccactttatgattatgtggtcacacccaagtcacagaaataaaaaactgactttaccgctgcaatttttctgttttcctccttactaaatactgatacattactccaatctattttataattatatttgacattttgttcacatcaactaatgttcacctgtagaagagaacaaatttcgaataatccagggaaacccaagagccttactggtcttctgtaacttccaagactgacagctttttatgtatcagtgtttgataaacacagtccttaactgaaggtaaaccaaagcatcacgttgacattagaccaaatacttttgattcccaactactcgtttgttctttttctccttttgtgctttcccatagtgagaatttttataaagacttcttgcttctctcaccatccatccttctcttttctgcctcttacatgtgaatgttgagcccacaatcaacagtggttttattttttcctctactcaaagttaaaactgaccaaagttactggctttttactttgctagaacaacaaactatcttatgtttacatactggtttacaatgttatttatgtgcaaattgtcaaaatgtaaattaaatataaatgttcatgctttacc

SEQ ID NO: 1806 - protein, 893 aa, Homo sapien [sequence omitted]

SEQ ID NO: 1807 - DNA, 3481 bp, Homo sapien
gttcagatattctagttgaattggagttggtgggctagtacaccttctaaattaaatgagtaaaggatttagaatggtgcctgacacacagtaggtgctacattcatgttagctactattataaacctttcctgcctctgactttcagggtcttgcccaccaccagcgatgcccagcccttggtagagcttgaaccaccttctataaacaggatggcggtggagagacaggcccagtccctgagcccatgaggagtgtggccccttcaggcccaaagatggggaacatcactgcagacaactcctcgatgagctgtaccatcgaccataccatccaccagacgctggccccggtggtctatgttaccgtgctggtggtgggcttcccggccaactgcctgtccctctacttcggctacctgcagatcaaggcccggaacgagctgggcgtgtacctgtgcaacctgacggtggccgacctcttctacatctgctcgctgcccttctggctgcagtacgtgctgcagcacgacaactggtctcacggcgacctgtcctgccaggtgtgcggcatcctcctgtacgagaacatctacatcagcgtgggcttcctctgctgcatctccgtggaccgctacctggctgtggcccatcccttccgcttccaccagttccggaccctgaaggcggccgtcggcgtcagcgtggtcatctgggccaaggagctgctgaccagcatctacttcctgatgcacgaggaggtcatcgaggacgagaaccagcaccgcgtgtgctttgagcactaccccatccaggcatggcagcgcgccatcaactactaccgcttcctggtgggcttcctcttccccatctgcctgctgctggcgtcctaccagggcatcctgcgcgccgtgcgccggagccacggcacccagaagagccgcaaggaccagatccagcggctggtgctcagcaccgtggtcatcttcctggcctgcttcctgccctaccacgtgttgctgctggtgcgcagcgtctgggaggccagctgcgacttcgccaagggcgttttcaacgcctaccacttctccctcctgctcaccagcttcaactgcgtcgccgaccccgtgctctactgcttcgtcagcgagaccacccaccgggacctggcccgcctccgcggggcctgcctggccttcctcacctgctccaggaccggccgggccagggaggcctacccgctgggtgcccccgaggcctccgggaaaagcggggcccagggtgaggagcccgagctgttgaccaagctccacccggccttccagacccctaactcgccagggtcgggcgggttccccacgggcaggttggcctagcctgggtcctccgcgggtggctccacgtgaggcctgagccttcagcccacgggcctcagggcctgccgcctcctgcttccctcgctgcggaggcagggaagcccctgtaactccggaagcctgctctcgcttgctgagcccgctgggaccgccgagggtgggaataagccccggttggctcgtgggaataagccgtgtcctctgccgcggctgcgatgtggccaggctggggctgctggtcgggggaagacagtgaactgcgttccctggcctgcttcctgcagagtttgtgcatggggagtgtgaggacatggagggtgggaggctgggcgttcagctgccagggccttccaatgccaccgttgtcacagacaatgcctgtccaaacgtcccggtgggatcagcactgcagcccgcccacaacagggtgggaagggaagactggagggggaaggaaggcaggagggggaaggaagaaagagggggaaggaaagaaagaggggggaaggaaaggaggaaggggagaaggaagggaggaggaaagaaggaaggtagggggtgttgggttgggagaattgagggagttataggcagaggaggatcctagctccagccataagaactgggagagccgcctgctgctccagaagacctgcccacctccacagaaatgctagcccttcagaccttctggtcagtgaactgggaccagctctgactaaggatgccttccatggcctgggactcgagttcttcagaaccaagaggctaactgggcttcctccaagaagggaccaggggctagaagcagaagttggcatcagcaaacatttctggaatctaccaaagggaggcccaggcagaaccccttcctcagtctcccttcccctcttccccccagccttgaagaggttgatcctttgtgctgtgtctcttagccctttcatcggggatgcccagaggcaacagcccaggctggaggtgccccagggaagggtgctcacagtggtcccagggctacacttggctttgactgcacagcccctgctcagatccttgtggagggtgtccgatgacttggggaggttctcttccccttcctagaggaggaagtgaccaagtttgaaggcggcagaaatggccacacagccaagaagagcccatgcaactcagtccaggattttactgggtcagtgacattggtggaagccttcatgcctcctcattccacagcacttcctcctatgttgaccttaaacactggcttcccactgatacagactgggatgagctgagggcagtctcatttactgtcaagagttgtatttttgtattgtcctttttgccaagtctacatgtgttgactctgtaatggatttatgtagcccacttcagtctgcaaataaagcaaagtaactggacaccttgggagtatgctgcagtccttatggggtaagggagtcttcaacaccagggggtcttgagggcccttgaagaaccaaaggagtcaggaaagggcagaggttgaccttctcagggcaaactcaagcagagcgattaggggatttgcacttgattacccagcaaatggtcaagaaagacacagcccttgagtgaagtagagccttctctccctccacttgagattcatgaagtgccacccagttcttcagtgtggtgttgcaaattcgctctgtggggctgtcctcagtgacggggctttgtttggagaggcccacatttgctgacctgcctctttaggctggagcatcttctcaacagtggcatatgccatgtttatcactgaggattaactgcatcatattaaaatgtaaatttgatcttggtcacttaatccctctctgggtcaggctcctagagtcctggagtgttccagaagagtagatccttcttctaaacagattaagtaaggacaatattggggattatgactcctttctctcctgagaggatgggtggaagaaaaagtccatctggtttggaaggtgacagaagccattaggatttatttcttattcaccagagttgtttagtcagatgagggctcatcttcctgtttacacacagggctcatcttcctgttac

SEQ ID NO: 1808 - protein, 375 aa, Homo sapien
MRSVAPSGPKMGNITADNSSMSCTIDHTIHQTLAPVVYVTVLVVGFPANCLSLYFGYLQIKARNELGVYLCNLTVADLFYICSLPFWLQYVLQHDNWSHGDLSCQVCGILLYENIYISVGFLCCISVDRYLAVAHPFRFHQFRTLKAAVGVSVVIWAKELLTSIYFLMHEEVIEDENQHRVCFEHYPIQAWQRAINYYRFLVGFLFPICLLLASYQGILRAVRRSHGTQKSRKDQIQRLVLSTVVIFLACFLPYHVLLLVRSVWEASCDFAKGVFNAYHFSLLLTSFNCVADPVLYCFVSETTHRDLARLRGACLAFLTCSRTGRAREAYPLGAPEASGKSGAQGEEPELLTKLHPAFQTPNSPGSGGFPTGRLA

SEQ ID NO: 1809 - DNA, 2287 bp, Homo sapien
  Unsure 2041-2057: Unknown base
catcggaacgagggctgcctcccagttcttcctttccactcccagagggggctgatcgcacaagtacaaagtatgttgctgcattcctaaccccaccagctctgagcccttcaggaataaatcacatggcaagctggagggagctgcagggacagaggccaaatgctgtctttccttgtgtaagggaggaactcttgctggccggggaatctcttggaattggtcttttttggggtttcagaggcaaagcttgaacaccatcagtcaagagtggttccgcgtctccagccggaagtcgtctagccctgccgtggtggcctcctacctccacgaggtccagcctcactccccacacttcctgaagctgcttgtcaacttggccgatcgcaacgggaacacggcccttcactacagcgtgtcccactccaacttctccatcgcgaagctgctgctggagacaggcgtctgcaatgtggaccatcagaacaaagctggctacactgccgtaatgatcactcccttggcttccgcagagaccaatgaagacatggctgttgtctggaagctcttaagagaaggaaatgtgaacattcaagctactcagggaggccagactgcgctgatgctgggagtcagccacgacagggaggacatggttcaagcgctgcttagctgccaggcagatgtcaatctgcaggaccatgatggatcctcggccctcatgctggcctgtcaccatggcaacgtggacctggtgcggctgctcctggcacacccagcctgcgacagcagcctgactgacaaggctggccgcacagctttgtccatcgctctgaagtcacccacccatatggaaattgctgggcttctgagagcccacgcggagcagggcaggtccctggggctgtaggggctgcagaagaactggccgtggggaacaaaagccttcttctctggactcctccctcgcccttgaagagggcagaggtcacaggccagagagccacccttctagagaagaaactatgtcaaatatgcacatacattcctgttgtataattctgctcattaggatgctttgtagtttttgccttaggccaagcctgaaaactacacggggcttcagagcagggttcaaggtgcaaggttgaggggtacgtcggtgtcatccaaacatccaaaacatcttcagccttgaattcctcatgactctaccctctgtaacattgtgtagcaagcaggcaggcaggagcacattagcacattagaaaagcaatactttttacatggaattttacagtgcactatctttctgttttttaagcaagtgtatacaaatatgtcccattgatatgcatgtctatagatgggaggggatttaagccaaccccctggcaagcattctgtaggggaccctagaagaatcaccgtgcagactggtgaaactgaacaagcaccatttgggagctttgtttcgatggggttgacagagaaatcttaaaatctgacagggtagaagaagcactttggcatcaatgccatatgtacagtcttgactatttctgagtcatctagtggctccaatttgctccagggaaattggaattaattaagaaatttattagctagtaagttgctatgtaataaagaaaaaaaagaaattcaatccaatgacacacaccacatgtatttgggcagagtcagattctctcagctattttgagtctgtggaagaaacaaaaaaaagcttcctcctgaggatgggttattgtcatcaagaagccacctgcatagccgtatccattacctcatggtaattcccggtgctttcccctcatatcccctagaagcaaatatctgttctgaggttttttgggacttctggctgcaataggagcaagggacccaggcagggcagagcaataccttccgaagcttccatattccctggggccagcacatgcaaggtttatatggtcagtagctcacgtgaagtcatctgaatctttcttaaatctgctctcttaaaatctcttatgcnnnnnnnnnnnnnnnnngccccttatataaaaagaagtaatgtcaaagtttgatgagctttacattggaaactcaaaagcttgcactctcattttggctcagatgccaatttgctgggtgcccctgtggtgagtcatgaaacctccttgggccgcaatttcatcatctctaaaaacagaaattatcatacaacctacctcctgggaggtgctgcacaagaagcagctgatggaagtttcaaaatcca

SEQ ID NO: 1810 - protein, 133 aa, Homo sapien
  Unsure 2041-2057: Unknown amino acid
MITPLASAETNEDMAVVWKLLREGNVNIQATQGGQTALMLGVSHDREDMVQALLSCQADVNLQDHDGSSALMLACHHGNVDLVRLLLAHPACDSSLTDKAGRTALSIALKSPTHMEIAGLLRAHAEQGRSLGL

SEQ ID NO: 1811 - DNA, 1578 bp, Homo sapien
ttctttctctcacctgccgggttcatgttagcgtacaccattctgcacactttcttcctctgtgtacgtgtgtgtggttttcctttcagaaatgggtcatactctgtggacatctttttccacttaaagtgatggcacagccattttcccagtcaagtaacatgaatgtacaagtttagcaaacttcctcctgagagatggagagatcaaggcttctgctccgtggcagccatccgtgcacatgcatcactgtgcgtgagttggtcccagtggcttgctgagacatgctctgcacaggggagatttcttataccagcagtgtgggaggcagtggggcaggtagagccacaagtggggatgagggagcagagtctagggcaggctcctggatggacaccagctacactgtctattggatgtgggacttccctcactgatgaaatgaataagagaatcttcctcatcctgctgttgttggcgttaaaacgggttaatgcatgaaagcaacaaagcccggcctgcagacagcacttggtaagtctcctcttcccagcatgttcaacaggaagccctcattccctctagaatgtaggagtcttgccagcagtggcctgtttgttctctgcctgttgccgacctgatgagaacataaaattggtgtcttctgtatagatttccttcttattgcccctactgtggctgaacataccttcccccgtgcttgaagtctgttcatatatgttctgctgtgataactgcccattcttgttctctatctaagaaggcatttagttttgaaaatattttgttggcttgtaagatatttgtacatattaagcacagcaaacctgtaacatattcactgtaaatcattattcctcatgcatcatttgccatttaactgtatttttttcctttttgatgtaacctgctatagtttacatttttaaatcagaaatgcctgcacattttaaaacgaagactcttatgctctagcctttgaggtcatgcttggaaagtcctttctcacacaaagattatttacactttcatctctttttctctgagtacgtttcagtgtttaattgaccaggaatgtatttcgaggtgtgatatgagacaaggatctgaaatgcttcgcccactgaatcatcatgcactgaccgaaatgccacctgtatgagtgctaaaatcattgtcgctggacctgtgtctgcactgtttaattttagtgttgtttctcacatcagcttctgttgttttcatggttgtggttctcatacttttaatatctgttggagcaaataaagcctcgtttctcatcttttccaaaaatgtcttatgtatgtgaactttggtgttatttgtcaagtctgggcattctcccacccccatattaaagaatgctctctggagtttgtctggaggttttgtttaacttttagattcacatcaggagaatctttgtcttcatggtaagtggtcttcccatctaagactatttcttcaagctgtttgtaataaaaagctgtgtgatttttgtatgtttattttggccaccttattgaaaccttattt

SEQ ID NO: 1812 - protein, 58 aa, Homo sapien [sequence omitted]

SEQ ID NO: 1813 - DNA, 3113 bp, Homo sapien
  Unsure 1741-1786: Unknown base
tgctacccgcgcccgggcttctggggtgttccccaaccacggcccagccctgccacaccccccgcccccggcctccgcagctcggcatgggcgcgggggtgctcgtcctgggcgcctccgagcccggtaacctgtcgtcggccgcaccgctccccgacggcgcggccaccgcggcgcggctgctggtgcccgcgtcgccgcccgcctcgttgctgcctcccgccagcgaaagccccgagccgctgtctcagcagtggacagcgggcatgggtctgctgatggcgctcatcgtgctgctcatcgtggcgggcaatgtgctggtgatcgtggccatcgccaagacgccgcggctgcagacgctcaccaacctcttcatcatgtccctggccagcgccgacctggtcatggggctgctggtggtgccgttcggggccaccatcgtggtgtggggccgctgggagtacggctccttcttctgcgagctgtggacctcagtggacgtgctgtgcgtgacggccagcatcgagaccctgtgtgtcattgccctggaccgctacctcgccatcacctcgcccttccgctaccagagcctgctgacgcgcgcgcgggcgcggggcctcgtgtgcaccgtgtgggccatctcggccctggtgtccttcctgcccatcctcatgcactggtggcgggcggagagcgacgaggcgcgccgctgctacaacgaccccaagtgctgcgacttcgtcaccaaccgggcctacgccatcgcctcgtccgtagtctccttctacgtgcccctgtgcatcatggccttcgtgtacctgcgggtgttccgcgaggcccagaagcaggtgaagaagatcgacagctgcgagcgccgtttcctcggcggcccagcgcggccgccctcgccctcgccctcgcccgtccccgcgcccgcgccgccgcccggacccccgcgccccgccgccgccgccgccaccgccccgctggccaacgggcgtgcgggtaagcggcggccctcgcgcctcgtggccctacgcgagcagaaggcgctcaagacgctgggcatcatcatgggcgtcttcacgctctgctggctgcccttcttcctggccaacgtggtgaaggccttccaccgcgagctggtgcccgaccgcctcttcgtcttcttcaactggctgggctacgccaactcggccttcaaccccatcatctactgccgcagccccgacttccgcaaggccttccagggactgctctgctgcgcgcgcagggctgcccgccggcgccacgcgacccacggagaccggccgcgcgcctcgggctgtctggcccggcccggacccccgccatcgcccggggccgcctcggacgacgacgacgacgatgtcgtcggggccacgccgcccgcgcgcctgctggagccctgggccggctgcaacggcggggcggcggcggacagcgactcgagcctggacgagccgtgccgccccggcttcgcctcggaatccaaggtgtagggcccggcgcggggcgcggactccgggcacggcttcccaggggaacgaggagatctgtgtttacttaagaccgatagcaggtgaactcgaagcccacaatcctcgtctgaatcatccgaggcaaagagaaaagccacggaccgttgcacaaaaaggaaagtttgggaagggatgggagagtggcttgctgatgttccttgttgttttttttttcttttctnnnnnnnnnnnnnnnnnnnnnnnnnnnnnnnnnnnnnnnnnnnnnnggtccggccttcttttgtgtgtgcgtgtgatgcatctttagatttttttcccccaccaggtggtttttgacactctctgagaggaccggagtggaagatgggtgggttaggggaagggagaagcattaggaggggattaaaatcgatcatcgtggctcccatccctttcccgggaacaggaacacactaccagccagagagaggagaatgacagtttgtcaagacatatttccttttgctttccagagaaatttcattttaatttctaagtaatgatttctgctgttatgaaagcaaagagaaaggatggaggcaaaataaaaaaaaatcacgtttcaagaaatgttaagctcttcttggaacaagccccaccttgctttccttgtgtagggcaaacccgctgtcccccgcgcgcctgggtggtcaggctgagggatttctacctcacactgtgcatttgcacagcagatagaaagacttgtttatattaaacagcttatttatgtatcaatattagttggaaggaccaggcgcagagcctctctctgtgacatgtgactctgtcaattgaagacaggacattaaaagagagcgagagagagaaacagttcagattactgcacatgtggataaaaacaaaaacaaaaaaaaggagtggttcaaaatgccatttttgcacagtgttaggaattacaaaatccacagaagatgttacttgcacaaaaagaaattaaatattttttaaagggagaggggctgggcagatcttaaataaaattcaaactctacttctgttgtctagtatgttattgagctaatgattcattgggaaaatacctttttatactcctttatcatggtactgtaactgtatccatattataaatataattatcttaaggattttttatttttttttatgtccaagtgcccacgtgaatttgctggtgaaagttagcacttgtgtgtaaattctacttcctcttgtgtgttttaccaagtatttatactctggtgcaactaactactgtgtgaggaattggtccatgtgcaataaataccaatgaagcacaatcaagattatgtactgtgtgtctgtaaagggtcagtgacaatgaaaaagacagcttgttttgttcaaaatatagactggatttcccatagagctcttttaataggtttccatgactcaataacatagcaaaatgcctccagacctaaataaggtgtttacctactgagagctacagatttaccctacattttcacagccggattcaaggtgttctagactacttgtaggcactttcaagatcccatctgctgc

SEQ ID NO: 1814 - protein, 505 aa, Homo sapien
  Unsure 1741-1786: Unknown amino acid
LPAPGLLGCSPTTAQPCHTPRPRPPQLGMGAGVLVLGASEPGNLSSAAPLPDGAATAARLLVPASPPASLLPPASESPEPLSQQWTAGMGLLMALIVLLIVAGNVLVIVAIAKTPRLQTLTNLFIMSLASADLVMGLLVVPFGATIVVWGRWEYGSFFCELWTSVDVLCVTASIETLCVIALDRYLAITSPFRYQSLLTRARARGLVCTVWAISALVSFLPILMHWWRAESDEARRCYNDPKCCDFVTNRAYAIASSVVSFYVPLCIMAFVYLRVFREAQKQVKKIDSCERRFLGGPARPPSPSPSPVPAPAPPPGPPRPAAAAATAPLANGRAGKRRPSRLVALREQKALKTLGIIMGVFTLCWLPFFLANVVKAFHRELVPDRLFVFFNWLGYANSAFNPIIYCRSPDFRKAFQGLLCCARRAARRRHATHGDRPRASGCLARPGPPPSPGAASDDDDDDVVGATPPARLLEPWAGCNGGAAADSDSSLDEPCRPGFASESKV

SEQ ID NO: 1815 - DNA, 579 bp, Homo sapien
  Unsure 80-119: Unknown base
ggtgaaatggggatggaaaagggttatataaaaacaaataatggtaacaataatgatgaagattggagtactccatctcnnnnnnnnnnnnnnnnnnnnnnnnnnnnnnnnnnnnnnnncatgttcattatagttcattacagttacatagtccgaaggtcttacaactaatcactggtagcaataaatgcttcaggcccacatgatgctgattagttctcagttttcattcagttcacaatataaccaccattcctgccctccctgccaagggtcataaatggtgactgcctaacaacaaaatttgcagtctcatctcattttcatccagacttctggaactcaaagattaacttttgactaaccctggaatatctcttatctcacttatagcttcaggcatgtatttatatgtattcttgatagcaataccataatcaatgtgtattcctgatagtaatgctacaataaatccaaacatttcaactctgttagaatagaggtaattgtgtggtttgtgtatgggactataacagtaatattaattcccaaaatttctcctactaggaacagtgggta

SEQ ID NO: 1816 - protein, 56 aa, Homo sapien
  unsure 27-40: unknown amino acid
  Unsure 80-119: Unknown amino acid
GEMGMEKGYIKTNNGNNNDEDWSTPSXXXXXXXXXXXXXXMFIIVHYSYIVRRSYN

SEQ ID NO: 1817 - DNA, 2531 bp, Homo sapien
  Unsure 1506-1696: Unknown base
gacaagcagaaggctggcagatctgtctctgggcagatggatcacctgatacagatgctggggcctgagccctgggattggcccaaaacagggctgtgttgacccaacagctgggcattggcatcctgtcaatctgccgagagcctagaaatagtgcgggggcagtctgctggtctcattgtgtcagaggaagcaaccatgcaggtgctaaccaagcgttaccccaagaactgcctgctgaccgtcatggaccggtatgcagccgaggtgcacaacatggagcaggtggtgatgatccccagccttctgcgggacgtgcagctgagtgggcctgggggccaggcccaggctgaggcccctgatctctacacctacttcaccatgctcaaggccatctgtgtggatgtggaccatgggctgctgccgcgggaggagtggcaggccaaggtggcaggcagcgaagagaatggaaccgcagagacagaggaagtcgaggacgagagtgcctcaggagagctggacctggaagcccagttccacctgcacttctccagcctccatcacatcctcatgcacctcaccgagaaagcccaggaggtgacaaggaaataccaggaaatgacgggacaagtttggtagaccttggacactagggaagatcccttcacatgatagaagacagactctttgatgaggtcggcggagcagttcactagccaatgatgagagcagaaaggcctagacctgcagccagaagtgaaggcggctcagttctccgggatgcttctctacctcctgagcaccaattcctggattccagtcactggctcacctttagaatgtctgttgctattcactgctcccctcgctcctcttaacagcttggggaggtgaccagtggttcaggagggactagacaattacctgtccagtgtggtatggtaggaagagtgtaggtgttggcacgtgaccaaaattcacatccctcctcatggcagtcattcagtatgtgtacttgtacaagttatttaacccattggagcctaaaatccctcattctataaaatggggataatattatctacctcacaagcttatgaaaactaaacatgatgaatcaaaagcacttggcatgtgagggctattaaaatagcctgattttttttttctccccctctccccaatgtatttgctctggcccttgctttttaccctccagagctaagaggtagcagagtctcttgggatgagtgattcaccctcttacttggcgaccactgatgagatcaacaacaggtgaactataaacctattatttattgcagaactaataaaaaatccaaagccttgtatttgtacatctttattatttctaaagcactttcctcaacctaatttcagtttttacaattggtactcaagaaaatagagacagaaatcatttgattttgcccagaaaccatctgcttatatttataaggccacctaatttgaaatcacatatannnnnnnnnnnnnnnnnnnnnnnnnnnnnnnnnnnnnnnnnnnnnnnnnnnnnnnnnnnnnnnnnnnnnnnnnnnnnnnnnnnnnnnnnnnnnnnnnnnnnnnnnnnnnnnnnnnnnnnnnnnnnnnnnnnnnnnnnnnnnnnnnnnnnnnnnnnnnnnnnnnnnnnnnnnnnnnnnnnnnnnnnnnnnnngcagtcgccataaacaacatgtaaacaaatgagcatggctgtgttccaatgagactttattggcagtgggccagatttgggtagtctgctaactctaaactagaattcaacctcatcttaaaatctttcagatgggtgaatggaaactgaccattctctgatgatgaactatttttcttacaacaataaagagtcagagtactcatggtacgtattttaattacaaggtgtcaacatacagattagcataagcttcaactgtcataagaaacatgttccatcaaattcagaaacagcaggtatcagtgaaactggagcaagcattttgaagacttcaacgtattggatggaatttttcaaaaatttcaccatatgttttcttatcttcttcaggaaaatcctctggatgtaatttcatatatccaaacatttcacggtccctcacagcatacaggtagtcttcacgttttacaagataatatccagcaaaaaaaaaggccgtaatatatagaagctggcgatgcaaaccagccgtcgcgatcggcctccgccggattaggttatcaatcaggccggagcagtagcccaagaagccgatgtagaggagccgcgggtcggtcagcttgggcgggggcaggctccgggcctcatccggcagaaaccgtaagggttctgggttccgccgtgcgatcatggtgacgccgtttccacttgaggcctggtctcagaccacgaactacaaggaaaaccacgacgaccactaccccggcctaagcggtcagctttctcctcctcctctgcgcgccggactcacgggcacggcgcagcgcggtgc

SEQ ID NO: 1818 - protein, 115 aa, Homo sapien
  Unsure 1506-1696: Unknown amino acid
MIPSLLRDVQLSGPGGQAQAEAPDLYTYFTMLKAICVDVDHGLLPREEWQAKVAGSEENGTAETEEVEDESASGELDLEAQFHLHFSSLHHILMHLTEKAQEVTRKYQEMTGQVW

SEQ ID NO: 1819 - DNA, 2797 bp, Homo sapien
acgcgcgccctgcggagcccgcccaactccggcgagccgggcctgcgcctactcctcctcctcctctcccggcggcggctgcggcggaggcgccgactcggccttgcgcccgccctcaggcccgcgcgggcggcgcagcgaggccccgggcggcgggtggtggctgccaggcggctcggccgcgggcgctgcccggccccggcgagcggagggcggagcgcggcgccggagccgagggcgcgccgcggagggggtgctgggccgcgctgtgcccggccgggcggcggctgcaagaggaggccggaggcgagcgcggggccggcggtgggcgcgcagggcggctcgcagctcgcagccggggccgggccaggcgttcaggcaggtgatcggtgtggcggcggcggcggcggcggccccagactccctccggagttcttcttggggctgatgtccgcaaatatgcagaattaccggccgggtcgctcctgaagccagcgcggggagcgagcgcggcggcggccagcaccgggaacgcaccgaggaagaagcccagcccccgccctccgccccttccgtccccaccccctacccggcggcccaggaggctccccggctgcggcgcgcactccctgtttctcctcctcctggctggcgctgcctgcctctccgcactcactgctcgccgggcgccgtccgccagctccgtgctccccgcgccaccctcctccgggccgcgctccctaagggatggtactgaatttcgccgccacaggagaccggctggagcgcccgccccgcgcctcgcctctcctccgagcagccagcgcctcgggacgcgatgaggaccttggcttgcctgctgctcctcggctgcggatacctcgcccatgttctggccgaggaagccgagatcccccgcgaggtgatcgagaggctggcccgcagtcagatccacagcatccgggacctccagcgactcctggagatagactccgtagggagtgaggattctttggacaccagcctgagagctcacggggtccacgccactaagcatgtgcccgagaagcggcccctgcccattcggaggaagagaagcatcgaggaagctgtccccgctgtctgcaagaccaggacggtcatttacgagattcctcggagtcaggtcgaccccacgtccgccaacttcctgatctggcccccgtgcgtggaggtgaaacgctgcaccggctgctgcaacacgagcagtgtcaagtgccagccctcccgcgtccaccaccgcagcgtcaaggtggccaaggtggaatacgtcaggaagaagccaaaattaaaagaagtccaggtgaggttagaggagcatttggagtgcgcctgcgcgaccacaagcctgaatccggattatcgggaagaggacacgggaaggcctagggagtcaggtaaaaaacggaaaagaaaaaggttaaaacccacctaagatgtgaggtgaggatgagccgcagccctttcctgggacatggatgtacatggcgtgttacattcctgaacctactatgtacggtgctttattgccagtgtgcggtctttgttctcctccgtgaaaaactgtgtccgagaacactcgggagaacaaagagacagtgcacatttgtttaatgtgacatcaaagcaagtattgtagcactcggtgaagcagtaagaagcttccttgtcaaaaagagagagagagagagagagagagaaaacaaaaccacaaatgacaaaaacaaaacggactcacaaaaatatctaaactcgatgagatggagggtcgccccgtgggatggaagtgcagaggtctcagcagactggatttctgtccgggtggtcacaggtgcttttttgccgaggatgcagagcctgctttgggaacgactccagaggggtgctggtgggctctgcagggcccgcaggaagcaggaatgtcttggaaaccgccacgcgaactttagaaaccacacctcctcgctgtagtatttaagcccatacagaaaccttcctgagagccttaagtggtttttttttttgtttttgttttgttttttttttttttgttttttttttttttttttttttttacaccataaagtgattattaagcttccttttactctttggctagctttttttttttttttttttttttttttttttaattatctcttggatgacatttacaccgataacacacaggctgctgtaactgtcaggacagtgcgacggtatttttcctagcaagatgcaaactaatgagatgtattaaaataaacatggtatacctacctatgcatcatttcctaaatgtttctggctttgtgtttctcccttaccctgctttatttgttaatttaagccattttgaaagaactatgcgtcaaccaatcgtacgccgtccctgcggcacctgccccagagcccgtttgtggctgagtgacaacttgttccccgcagtgcacacctagaatgctgtgttcccacgcggcacgtgagatgcattgccgcttctgtctgtgttgttggtgtgccctggtgccgtggtggcggtcactccctctgctgccagtgtttggacagaacccaaattctttatttttggtaagatattgtgctttacctgtattaacagaaatgtgtgtgtgtggtttgtttttttgtaaaggtgaagtttgtatgtttacctaatattacctgttttgtatacctgagagcctgctatgttcttcttttgttgatccaaaattaaaaaaaaaataccaccaac

SEQ ID NO: 1820 - protein, 211 aa, Homo sapien [sequence omitted]

SEQ ID NO: 1821 - DNA, 1362 bp, Homo sapien
tttctctttttcaaatgttttttaatatcctgcaggtaataacactgatttttctaatactcagaaacatctacttagcagttgtgatactaatttgcaaaatgtaataatgttatacaaatataagatactactaaatacatagtagaaataattgcatgattcctgatatttatattcaaggtataaacatgactgatttcgctgatactacagaataaaaaaaataaagctgctatgtaaaaaattaaagaatatctcaattagatatttttgttcccaatctctttcagacagatctatgaaataatatagaatatactatcaatatgttctttcatatgaagtgaaaaaaatgggatttaagtagtgagataatttctattttttacttttttaaaaaaatagacagggtcttgctatgttgcccaagctggtctcaaactcctgggctccagtgtgcttcctgcctcagcctcccaaagtgctgggattataggcatgagccattgtgcctggcctgtgggatcatttctattggtttttcttagagtcaaggtcttgctctgttgcccaggctgatcttggacttgcgagccaccatgcctggctgggttttttaaaaatagaatctcactgatagcctgcaagaaacagatgcagtgcctgcttccgtatcagtccaaggagccctcgtgtttgccacctttacctttgaacctccccctgcctccctgcctgtgtccgcttttgcagctcaatgcagccatgacaaggaaagaaaagacaaaggaaggccagagagccgcgcagttctctgcaggtgcagatgcaggcagtggaggtggcctgagcaggcagaaggacaccaagcgccctatgttgcttgtcattcatgacgtggtcttggagcttctgactagttcagactgccacgccaaccccagaaaataccccacatgccagaaaagtgaagtcctaggtgtttccatctatgtttcaatctgtccatctaccaggcctcgcgataaaaacaaaacaaaaaaacgctgccaggttttagaagcagttctggtctcaaaaccatcaggatcctgccaccagggttcttttgaaatagtaccacatgtaaaagggaatttggctttcacttcatctaatcactgaattgtcaggctttgattgataattgtagaaataagtagccttctgttgtgggaataagttataatcagtattcatctctttgttttttgtcactcttttctctctaattgtgtcatttgtactgtttgaaaaatatttcttctataaaattaaactaacctgccttaagaacagaaaaaaaaaaaaaaaaaaaaa

SEQ ID NO: 1822 - protein, 169 aa, Homo sapien
MQCLLPYQSKEPSCLPPLPLNLPLPPCLCPLLQLNAAMTRKEKTKEGQRAAQFSAGADAGSGGGLSRQKDTKRPMLLVIHDVVLELLTSSDCHANPRKYPTCQKSEVLGVSIYVSICPSTRPRDKNKTKKRCQVLEAVLVSKPSGSCHQGSFEIVPHVKGNLAFTSSNH

SEQ ID NO: 1823 - DNA, 3010 bp, Homo sapien
  Unsure 371-604, 1310-1615: Unknown base
taacctcatcctaaaacatcctcacagaacatccagaataatgtttgaccaaatatctgggcaccaatggcacattcaagttgacataaaattaaccctcacaataccgtactgtacaacttttggagtgaagctggaatgtcatcgcatttccaagactaactcagtgtccacaaatgatgcttaagtcatgaggatcatctcggatttggatttggatgcctgtcaagccctcactcttcagactaaatgtctgatttgcatggagaattatcaagagaagcaacaatgccaagcagactattccaggtcaaaatagtcaaattaataattcataaattattatatgttttgaaggtatcgcaaaattnnnnnnnnnnnnnnnnnnnnnnnnnnnnnnnnnnnnnnnnnnnnnnnnnnnnnnnnnnnnnnnnnnnnnnnnnnnnnnnnnnnnnnnnnnnnnnnnnnnnnnnnnnnnnnnnnnnnnnnnnnnnnnnnnnnnnnnnnnnnnnnnnnnnnnnnnnnnnnnnnnnnnnnnnnnnnnnnnnnnnnnnnnnnnnnnnnnnnnnnnnnnnnnnnnnnnnnnnnnnnnnnnnnnnnnnnnatttatagcaaaatgatccaaaccaggagcatgcattgcatttttatgaatttttaaaacaattaagtctgtgtagtgagtgaagccacagtgataggaatatataaaggctttgcatctagaatttgttctgaaaaccctgagattcaagtagtacattatttcatttactattttacacagagaagccctcatttttaagagtttgcctttctgatttccaccggaaatgatactatcagtatcatactcagaatcttaattacatacaaggcactaacctctcacctgttttcagctttgtgtaaagacaagggatcaaaacatccctttctgctatttcatacttaagtgtgggagctgatccaaaggaagaatagtttcaaaagtttgtagcaaaaaaaatttaaaaggtgaagattttttccttgaatgattctcacctggcagatctatggaaagattagctgactctttggatccctgaatatagttaatagaaatttggaaggaccatgtcaaaattaactaatgtgaactgacaaagatttggtgttcaaagcaaaaattaaactttggaaaagtgagcaagtacttaatcagaaacaaaaaaaaaaaagaaaggaaaagttaggtgaaaatggtttccaggtgttgttgctgttatagtttgaatcataaaagttgttaaaagtctgctgtaacnnnnnnnnnnnnnnnnnnnnnnnnnnnnnnnnnnnnnnnnnnnnnnnnnnnnnnnnnnnnnnnnnnnnnnnnnnnnnnnnnnnnnnnnnnnnnnnnnnnnnnnnnnnnnnnnnnnnnnnnnnnnnnnnnnnnnnnnnnnnnnnnnnnnnnnnnnnnnnnnnnnnnnnnnnnnnnnnnnnnnnnnnnnnnnnnnnnnnnnnnnnnnnnnnnnnnnnnnnnnnnnnnnnnnnnnnnnnnnnnnnnnnnnnnnnnnnnnnnnnnnnnnnnnnnnnnnnnnnnnnnnnnnnnnnnnnnnnnnnnnnnnnngggggaagcgggacaaacattcgttttgtagcaaaaggagtagagtaatatctgccaataactggaggaaagaattgttcttttaaaactattaaattgtttaatgggatttaaatgatttcaggaatgaaatggaaatcctggtaatgggtagaaacataggtaaattctccttttccacttaccaccacctgtgtgaacaacaatcatttctcattaatagtcaagaatttgaagagatcatgagtaaaaagtcttgatcagaaattgtgtatagctgtttccagcataaaaccttatataaaatgcatattcatagaagatgctcaagtatgtcatgaaaaatatgaagtttatttaaatatttatacaaattaaagatttactgtattctctaacagcgcgtattttcttttttgtaataactatatgaaataaatacaaagtaacacgtttttaccaagcccccttcccatccttctcatcaccctcaaactccctccaaatagagtcagagaaacagccagagggatgtctccactgagacacagggaggtcttgcacccaggcagttcagcagttcctgggcgggtggcccttcccatctgagtacccctcaatgtgcctgctcctcctgggatcctttctgctcccttgggcctctgtttttggtctgcaatggttggttatgtagagggatcagtattggggttgtcccaagccaggctacaggttgagcaggtagccacataggccacatagcaggacgggcccagctggggactctgatgtctgcaattaggggtggcaggaagtaatggatgcacaggcgctgacttggcctggccttaagccttagtctagcggaaaggtctggctgtttacctgccttcctatttggagctgatcccaggaccaaacgggatgccatcgtaccaagggcagggagatgaagggaggccctcagaagagaatgaggcctaaatgccaggtaaagggcaggaaggggttcaatcccagcagcacctcctggtggtagttggggaaataaaatggccagagaggagactggccctgaaggcatctccagagcttgagtccctcagtagccaacctgagctcctaaacccctctggactaggtccccttctccacttaacctgcctcctcaagaaagacaggatggggccgggcacagtgtggctcgcgcctgtaactgacttacttctaacgaatagaatattgcaaaagtgatgggatctcacatctgaaattaagttataaagactatgagttctgtctggcatgtgggcactctccttctatctctagctcatcttacttgtttgctgtgatgaagcaagctgccatattatgagccaccctatgaaaggg

SEQ ID NO: 1824 - protein, 120 aa, Homo sapien
  unsure 41-119: unknown amino acid
  Unsure 371-604, 1310-1615: Unknown amino acid
MSDLHGELSREATMPSRLFQVKIVKLIIHKLLYVLKVSQNXXXXXXXXXXXXXXXXXXXXXXXXXXXXXXXXXXXXXXXXXXXXXXXXXXXXXXXXXXXXXXXXXXXXXXXXXXXXXXXL

SEQ ID NO: 1825 - DNA, 688 bp, Homo sapien
cctcctctgggctatgtagagaaaatgagggaaaaaatagggttttgattttctgcagataaggttagttgaggtttttagtatgacttaatagatcttaaagtgtttatctgtggtttccgtactgcctatgatacattataagaatttataattaaagtttattaagaggaaagattatgcttatattttaggggaagggggaatattgaactacatttatagtgattttgtttcaggtttttctgaggaattttaaataccctgtgtcctcttaatagtaaaaacagtttgaggtactctgagtttcttacaactatttgtctctgaatagttttctcttaaaatttgacaaatattaaaaacattgtccttccttctttggttacagtggagtctcttctgttttgccaggaaagttaacatattttttcttccatttttgttcatcatttataaattagatggtatagattttagcaaatagatctcaagagctggattcaattagcagctttttaggacataaacattaaagggttagatggaaaagattgttttgactgactggataaatgacagggctgtgtttgatgtgcgtccaggaattggtctggagctggtgcccaacttctcagtccatcttgagaagccaaataaaatatttaacctaggcctcattttgttt

SEQ ID NO: 1826 - protein, 47 aa, Homo sapien
MEKIVLTDWINDRAVFDVRPGIGLELVPNFSVHLEKPNKIFNLGLIL

SEQ ID NO: 1827 - DNA, 3094 bp, Homo sapien
tttctcgcgcgcgagccacgcgggggacaagtcgcggccacctgctccggagctggggagcccgggcgccgtccgcccgcgcgtcggttcgtgtgccccgggccccatggagctgcgggtcagcaacaccagctgcgagaacggttccctgctccacctctactgctcctcccaagaagtcctgtgccagattgtcaatgacctcagccctgaggtgcccagcaatgccacctttcacagctggcaggaaagaatcaggcagaactatggcttctacatcggcctgggcctggcattcctgtctagcttcctcatcggcagcagcgtcatcctcaagaagaaaggcctcttgcgactcgtggccacgggagccactcgagctgtggatggaggcttcggctacctgaaagatgcaatgtggtgggctggatttctcaccatggctgctggagaagttgccaactttggagcctacgcatttgcacctgcaacagtcgtcacgcctctgggagcgctgagtgtcctcataagtgccatcctctcctcatatttcctgagggagagtctgaacctgctggggaagctgggctgtgtgatctgtgtggccggaagcacagtgatggtgatacatgctcctgaggaagagaaggtcactaccatcatggagatggcttccaaggtgaaagacacagggttcatcgtgtttgctgtgcttctgctggtgtcatgcctcatcctcatctttgtcattgccccatgttacgggcaaaggaatatcctcatctacatcatcatctgctctgtgatcggggccttctctgtggctgctgtcaaggggctgggcatcaccatcaagaacttcttccaggggctgccagttgtccggcacccgctcccctacatcctgtccctcatcctggcactgaccctcagcactcaggtcaacttcctcaacagagcaccggacattttcaacacttccctggtgttccccatctactacgtgttcttcaccacggtggtcgttacctcgtccatcatcctcttcaaggagtggtacagcatgtctgctgtggacattgcaggcaccctctcgggctttgtcaccatcatcttgggcgtgttcatgctgcatgctttcaaagacctggacatcagctgcgccagcttgccccacatgcacaaaaacccacccccttctcccgccccggaacccactgttattagactggaagacaagaacgtccttgtggacaatatagaacttgccagcacctcatcaccagaagagaaacccaaagtatttataatccattcctgaagcttggaatatgtgagtgagaggatgagtccgatggtacagcctgccctcccaatttcaaaaccacctggttattttccagtgcaactgttaccaatgggctctcttttcttgagaagttcatttatacctcatcactgtttccaggagaaaaatctttacccaaatagcaatggtggcagaacttcctggaaacagattcagtgaccaaatacccaagtttacatcagtgcctgcaggttccctggaccttccttctcattcattctttcggtgccatctctatgccgttgggaagaagatggagtctgacccactgaatgtagcacagtccaaggacttctctaagatattggtcattggaagttccttcacaccaattctcctcctgagacggaatctccgttgttgttgttgttgttgttttctagcccaaggatgacatagagctggctcccagaggcccacagagcaattggccatgcctccctatccagagctgacagggacacaaccagtgtaaaatatcctgttgcctttgtcacttcctctttggaggcagaagcaagacctcagctgaccttcttactgtgaaagccacttgatgtctcagggaaaaatttcaaccagctcattccccgagcactccagcctggcagtcagcacctcggcatccacccagtccatcccaccatcaccccttccccctctacttacatcctaaggagtcggtcactgagacataaaggcagtaatcgcagaactggaaacaaaacaataatagagccacagccaaactctggtggccaaacccagtgttgcattttgtcttactctgaaagaagaacagcaaattcactgcttcaaagtggcctggctgccaagctagaatttggcagaacgcactttactattcctcaaggagtcaaccaacctatgatctggggaggtgggaagaggatgaggagcaaagttgggatttggcagaaggcagtcccaggctctctggatactaggggctaacttttgtgttgactctggtgctcatctgggaacttaggagaaacgagctcaggggtaatttctgggttgcagccttaaaggcttggacagctgtgaatctcaatggccaactggaggtgcagacttggcatggggtgcattctagctgttgaccagattgctaccgagtcccctcctccactgatgagctgcccacactgggaagcagcatgccctgactgttccaacaccacctgctatggggagtacctttggtcccctcacatttggccagaggcatacaaaaaaccagagcagctggagagggagataattactattccttcccttcctatctcctttctagccacaagagtgtgggggttggagaagaaccattagaaagggaaattagtgggctggtgtatctggaaagagggaagacttgatcctcagccccgaggttggtgcagggcctcccctgtgtgactctacctgcactctgtgtttatatcctgtgccctaagtgggccaagcccaggtaaattcctgctggccttggaactccaaggtttggctgaccagcagactggctccctgactcttcagcctcaaatccccagtttttgatgaatgtggatttctgtctgtaattaaaagcaatgcaacaagttggctcttgagaatggcagtaaactgagggccctaagagtgtggtctgcagggtcaagaataaagattacagattatatttaaaaaaaaaaaaaaaaa

SEQ ID NO: 1828 - protein, 439 aa, Homo sapien
FSRASHAGDKSRPPAPELGSPGAVRPRVGSCAPGPMELRVSNTSCENGSLLHLYCSSQEVLCQIVNDLSPEVPSNATFHSWQERIRQNYGFYIGLGLAFLSSFLIGSSVILKKKGLLRLVATGATRAVDGGFGYLKDAMWWAGFLTMAAGEVANFGAYAFAPATVVTPLGALSVLISAILSSYFLRESLNLLGKLGCVICVAGSTVMVIHAPEEEKVTTIMEMASKVKDTGFIVFAVLLLVSCLILIFVIAPCYGQRNILIYIIICSVIGAFSVAAVKGLGITIKNFFQGLPVVRHPLPYILSLILALTLSTQVNFLNRAPDIFNTSLVFPIYYVFFTTVVVTSSIILFKEWYSMSAVDIAGTLSGFVTIILGVFMLHAFKDLDISCASLPHMHKNPPPSPAPEPTVIRLEDKNVLVDNIELASTSSPEEKPKVFIIHS

SEQ ID NO: 1829 - DNA, 620 bp, Homo sapien
gctcgaggagaaattgatgatatatttaacgaaatcaaatttggtgaatatgtggacactggaaagctaatcgacaagatcaacttaccagatttcctaaaagtgtaccttaaccacaagccaccttttggtaacaccatgagtggcatccacaagagctttgaggtgctcggttataccaactccaaagggaaaaaggccattcgaagagaggacttcctgagactgctcgttactaaaggtgagcatatgacggaggaggagatgttggattgctttgcttcactgtttggcctgaatcccgagggatggaaatccgagcctgcaacctgctccgtcaaaggttcagaaatttgccttgaagaagaacttccagacgaaatcactgcagaaatattcgcgactgaaattcttggcttaaccatttcagaagattccggccaggatggtcagtgaagttaccaggaatgtttaaagcacaaaggactttgggtgtgtgtgcatgcacatgtgtgtgttttccatgaggcactgctttttatgcatttccctcccccctctcatctttagaacatttagacattaaagcaagtttctggtgagcaatggaattcacaaaa

SEQ ID NO: 1830 - protein, 151 aa, Homo sapien
ARGEIDDIFNEIKFGEYVDTGKLIDKINLPDFLKVYLNHKPPFGNTMSGIHKSFEVLGYTNSKGKKAIRREDFLRLLVTKGEHMTEEEMLDCFASLFGLNPEGWKSEPATCSVKGSEICLEEELPDEITAEIFATEILGLTISEDSGQDGQ

SEQ ID NO: 1831 - DNA, 847 bp, Homo sapien
gccgccgtctcgtcgggccgacctgggggccgcggagctgggcggcggggcaggcgctggctgcagtcacctcggtgctgggcatgtacgcggcggcgtgggccgtacgcgggcgcgcccaactacagcgccttcctgccctacgccgcggatctcagcctcttctcgcagatgggctcgcagtatgaactgaaggacaaccctggggtgcaccccgccaccttcgcagcccacacggcgccggcttattacccctacggccagttccaatacggggaccccgggcggcccaagaacgccacccgcgagaacaccagcacgctcaaggcctggctcaacgagcaccgcaagaatccctaccccaccaagggcgagaagatcatgctggccatcatcaccaagatgaccctcacgcaggtctccacctggttcgccaacgcgcgccggcgcctcaagaaggagaacaaggtgacatggggagcgcgcagcaaggaccaggaagatggagcgctcttcggcagcgacaccgagggcgacccggagaaggccgaggaattaagacaaatatttcagactggtgtaaaggacaaatatgacaacgacgtcaaggactcgcatccgtcgctttctgcagaaaggggcttcttcggtcccgagctcgcgtccaggtggccaggcctctgccggcggctccagtggctgcgattatcgggttcggtaaatgcccccacgtgcttgtgtctctttccccccttttctgtatatagagtggtttcagattgtaaatagcgcgtcagcgaacttgtctaaatcatatatttttgtctaataaactaaatgaaatgac

SEQ ID NO: 1832 - protein, 262 aa, Homo sapien
AAVSSGRPGGRGAGRRGRRWLQSPRCWACTRRRGPYAGAPNYSAFLPYAADLSLFSQMGSQYELKDNPGVHPATFAAHTAPAYYPYGQFQYGDPGRPKNATRENTSTLKAWLNEHRKNPYPTKGEKIMLAIITKMTLTQVSTWFANARRRLKKENKVTWGARSKDQEDGALFGSDTEGDPEKAEELRQIFQTGVKDKYDNDVKDSHPSLSAERGFFGPELASRWPGLCRRLQWLRLSGSVNAPTCLCLFPPFSVYRVVSDCK

SEQ ID NO: 1833 - DNA, 1154 bp, Homo sapien
acaggcacaggtgaggaactcaactcaaactcctctctctgggaaaacgcggtgcttgctcctcccggagtggccttggcagggtgttggagccctcggtctgccccgtccggtctctggggccaaggctgggtttccctcatgtatggcaagagctctactcgtgcggtgcttcttctccttggcatacagctcacagctctttggcctatagcagctgtggaaatttatacctcccgggtgctggaggctgttaatgggacagatgctcggttaaaatgcactttctccagctttgcccctgtgggtgatgctctaacagtgacctggaattttcgtcctctagacgggggacctgagcagtttgtattctactaccacatagatcccttccaacccatgagtgggcggtttaaggaccgggtgtcttgggatgggaatcctgagcggtacgatgcctccatccttctctggaaactgcagttcgacgacaatgggacatacacctgccaggtgaagaacccacctgatgttgatggggtgataggggagatccggctcagcgtcgtgcacactgtacgcttctctgagatccacttcctggctctggccattggctctgcctgtgcactgatgatcataatagtaattgtagtggtcctcttccagcattaccggaaaaagcgatgggccgaaagagctcataaagtggtggagataaaatcaaaagaagaggaaaggctcaaccaagagaaaaaggtctctgtttatttagaagacacagactaacaattttagatggtaaggttcacaaataggttgatttctttcttcagctttctgacatgtccagcccatctctaatgaggactcccagatcatcactttatggctgttaggtgtttcccatatgaaattagaggagctgggtcagggagacaaaagtcttctattagtcttatggatagctcctccttgagtgtattttgtgcaaaagattaagaagctggactctactgccattaaagctgagagaatcctaaggttatttgtggcttcggggttatatttattactactactactaataaatattcaacaagtaaataaatcttttttaaatcaaaaaaaaaaaaaaaaaaaaaaaaaaaaaa

SEQ ID NO: 1834 - protein, 215 aa, Homo sapien; identical to SEQ ID NO: 384

SEQ ID NO: 1835 - DNA, 2179 bp, Homo sapien
  Unsure 520-812: Unknown base
ctgtttcctttgcaaactgacataaaaatgaagaagcaaaatgtgtctttagttatatccaagttccaaattcaagttaattactgctgctcctcactcttctaccttttccttcaaatttaaagatgggctttgcagagattaaagcttcagaaaaaaatatgggaaaatatgttaaaatgttgacctgaaaatgaagtggatgactataaaactcttgagagaattagactttttgtagcagtttattacatgataataccttaaaggagatcacattcagtgacctgcgttgacaggtaatatttaaaattaagtattaatgctgattaattcaggcagatgggtggtagcctaaagtatagacatttttccaatattaattttgatattaaataaatgacatcggctcttgttggatattgtaaaatttcctttacttcaactgtaaaataatttcaacagtgaaaggtataaagtaagatgaaaatttccatcatgatcttacctagagataacnnnnnnnnnnnnnnnnnnnnnnnnnnnnnnnnnnnnnnnnnnnnnnnnnnnnnnnnnnnnnnnnnnnnnnnnnnnnnnnnnnnnnnnnnnnnnnnnnnnnnnnnnnnnnnnnnnnnnnnnnnnnnnnnnnnnnnnnnnnnnnnnnnnnnnnnnnnnnnnnnnnnnnnnnnnnnnnnnnnnnnnnnnnnnnnnnnnnnnnnnnnnnnnnnnnnnnnnnnnnnnnnnnnnnnnnnnnnnnnnnnnnnnnnnnnnnnnnnnnnnnnnnnnnnnnnnnnnnnnnnnnnnnnnnnnnnttctttgttaattttatatgtttcggttatgtaaatatataactgaaagggtaaatatatataaatacatatttactgcacatttatattgatatatatttctctgcttgtatctatctatatacacactttataaataaatgagtcaagatttttaaaacaaaataccaaatttttcagtatcatttgaaatttttcaaaattacttttttaaaatttctgcatattcattcagtgaagttgaatgatccagtgggcactctgtattccttcataaactgtgtggtgaatgtggcgtgtcgtgtatatggtatgtatatggcacgtgtttatgtgttttctggggttaatttccttaaaataaaaaggcaactgtcaagactaaagctataataatttttatgaatcttagaaaatgttgaatttttagtgattccagaaattgatctctatcgatgaaactgctttctcaaatacgtcagcaatgggatccaggctttgcttacaatgtgaaggaagttcttagtctcattgcacaaagaaggaaggagggctaaagataaaaagaactcatagtcttttccatagttttgggtcatgttcactgtaaaaaaaaatcacaagatgccatttttacacagcctttttaatctacacatacggcaagctaataattccaaaaaaataatttctttcctttgtagccatttaaaactaacagctagaaatatttcttcttccaattattaaaaataagctgtttctgagtcggtgctgactacatttactgattgaagcagccaactccaaatataccatcttttagtattgacacttaaaataaaacttctccccagaaaaagagttctataaatgatggctgtagaaataggcactgtccaggcagttgttttgtggaagtagtgttgttattttctggtgttttccaagtcatctcagatggtgcgtgaaaatgagatgccaaagaaggcttaaaaaagataccctgcaccagcttcagaatgtaagcaaatctttcattccagcgcttaaaagttttgagaaagctaatctaaagttaaatgtttactagcatctctccgattatattttagaaactactgcacaaaaataaaacaaatttcttattttctctgggttgaaaagtgcacataaaatggaaaatgctttttataccactatttccagcagggattttattttcatttgtcatttgccagcctggggtatgttgggagaaggaacaattgatttttgaaaaggtgcatttgtgtgaaaaccaaaaattgtgttcaacaaatactactactaacccatatgtggatatatgtgttttatacatgagt

SEQ ID NO: 1836 - protein, 120 aa, Homo sapien
  unsure 13-110: unknown amino acid
  Unsure 520-812: Unknown amino acid
MKISIMILPRDNXXXXXXXXXXXXXXXXXXXXXXXXXXXXXXXXXXXXXXXXXXXXXXXXXXXXXXXXXXXXXXXXXXXXXXXXXXXXXXXXXXXXXXXXXXXXXXXXXXSLLILYVSVM

SEQ ID NO: 1837 - DNA, 5388 bp, Homo sapien
  Unsure 1818-1839, 3706-3726, 4193-4217: Unknown base
gacctcttccccccaccttgtaattttgcttttttaatttcggtatttaaatacttttttttttttttaagcatcaatgtagtagtactctgggccgaacaggggtcaacgtttaatctacagttatcaccaacatgtatgtacttatgtcggaatcaaaatgtatcaaactgcttattgtgaagagaattatagcagacctgaagggggcgaaaaaccagatagggtggggggatggatgccggtgacgtgctagcacttgtgtggacatcccagtctgcattatgctgtttaacataaagtgccgacattttgtaccagcaaatacctgcccattccaacccttggtgggagcagacctctactgtcctctgtaacttgctgctattgaggacaagggagtttttctttctttagcgtcttcagtgaaggatacaatacaacaatgcctaatgtatttgactttttagcttgtgtctgtgtgtataggaaaagcctaaaacaagttatttgcatttcagtggttttgtgagacaaagaatgggaaattctgtagcccttctggcttaccctgttgattataaacctagcctcaaaagagattgacaggcatgactcaagtgagtgttcacatatacaagcctgcatgagccctctgtgggtaggtggtcacacttggcatctgcagcattgacgtggccccgctgggtgccttgagcatgccctcttcctgctctgcaatttgaatcaccaccgtgccccttccaccactgttccccatgcaaaagctctgcttccagcagcccccactgaccgctctctgtgtggagcaaagtgctgtcgtgcggtgaccaccaggtgaagagcagcttgtattcagacatctagagaaggttaaatcttagtgtccctgggccaggagcatatcccaaggctcctgcgagccagtggcgaccctgtccactgccgctcttggttcactgctgtgtcctgccccaccctcctctcctcctgcctgttggttccttgacctgcactatgggttagttgagttccttacgatactacggtgaaagccgggtgctagagcccctcttgtttacaagacataatgagggatttgaaatatgtaaaaataaacatgagaagctaaaatgttcttccatcataagcttaaagggaaaaaaactaaaaactttaaaaaaaaaagaccaaaaagtgcgtatatatatacatataaatatatattttagatgaagactaactctgggagcatttaacagtgttttttgtttctgtttttaacatttgttttcctgctttaaaatttgcaagcattctcaggaattctagggtaggaagccagttttttgaagatggtttatttaaccatatcttatcctagagagatggctgtttctttcctgttaataaacttttacaagttcctgaaacttcagaaagtttaaacaatttttacttaaaaaaatgtaaaaagaaaagtctccaaacattattgtcatactggggatcacacattttaaaacacatagaaatattttttaaaaattatcaatttagcagcaacaggtaaattcattatcttaaaaatatgggagaaggattaagctttgtaagagctcgatcatggattcttttgaaattgtgtgtagtttaatgggagagtgtttggtgtatatagatgagaatgccatcactttgttcctttccatttgagactgaactgaaatctcccctagtaatttttattttttttaaaggaacccttctccttgtccccacaaccccagcaacaannnnnnnnnnnnnnnnnnnnnncaacagcttaaaaaaaaaagtaatctgtaaaatagtacagttggattgctgagaatctatgtaaagagttaggagatataggttaataatttttggaacaaattttaaatataggcattactagaggaaaattatctatggactgtcctattaatgaagaatgtctgtcttacctccgtttgttttgggaggaggagaaaatatagaagaatctaataaggaacaagtgattttacttttttagctcccagctactgttgtgctcgttttaattgctgttttgaagatctgctgcttaattatccccatcccttagccggagatgtggagtgtttcctttcagtttttggtgatgttgaattcttttgtattccctcctggggccaggggtcagaattcccaagcatgaccacagcttcttttaaacattaagcttcccagtgggaaggaaactccagctcgacaggtaaagggagtgggtggggttgctgcctgcaatttctctaaaaccgctttagtgccttcgtacatacacccagacatcctgagcaagggggacgcacatgtgtgtgtgtgtggtccagtcactccacagatgtaagatactcacccataaaggaaattggagtggttctggacaggccccaaaggcagtgggctgaatttaaaataaataaacaaacgtcaagcaagttaatatgcttatgtctcagtaatgtagaatgccaagttccttcctgtgtcgtgtgccctccattactgtgcattgattcctccaggtgtgtaattgtgacaactgcagtgatttggaaagtctctttgtcttgggcaaatagaaggggttcctgttgttctgctcttgtccttcgtctcctccccttttcccccagacctcccccttctttttgtcaacttgctgggagctttgctttattggttggcagtgacctaagaacaggatatggtgaggatgtcatggaagagaagagctctttccgtggtattctttggcaagagccatgtctactaagaggttaggtgacttcagtatacttataaaattcagtgagagtgccttcttctcttctaccacactctggcatagatacaggcttgctggtcacctctcattacatagatttattttaaaaacattttgattatgttaatttgagctttcccttttttttttttaactactttttaaaacacttgattactagtggcttagaggtgtgtacatctcctgaacatcacaaacttggtttctacctaccacacgagtagccaaaagaaaagaagcactaatagagaaaggggtgtctcacaccagacagaggacctctgctgtcaattagatccagtatcatgacctaactttaagtgtggaaaagagttcagatctctgagacactgtgaagaaatggatggctcatgtaacatctctgatccctcagtccccaaccctggacgtgtttcatttacaacattcataggagttaacttagcagtgttgcaagttaaggttccaaaccaaattatttaatcagtgtccccccaataaatcacttatccatttattgctagttagttttatttatagcaacttgatttcctatgagtatggctcctgttgtaagaattttcccacctcttctgacatgaatgtagcataagttagcaatcggttcttccaaactcctgtgggttgaatatggtatagaaggtatgcaagaggaaaaagaaaggaaaagataaaactcctgcctgagaatttggaagcacctttattaacacatatatctcgcagaaactagaagctcataggctgttaactttttgcaactattcactcatttttaccacnnnnnnnnnnnnnnnnnnnnntgatttttgtaaggttaacagccagattccattttgacctcagatgctgtgtactttttaatttcattttttatattctgccatcttgactcttctctaaaacagaatgaaaatgtctgcatgctgagcaaaatgcttacgccaagcctgtttttctctgtagagtaaacaggatgttttcagcagacttggctctaatagccatctctaagattagggaacaattgagtctttatgtagaaaagatccattttttccccatcctcagagttaaaattcaacatttaaagctttatcggttattgttttagatttgagatttttgtttttaagtatctataagatctttagaagtgagataaatttttcgctggttaaaaaaaatcaaactttcctctgcagtgtttttgccaagttttgtcacacttcatgtgtatgcattaactatacttcttagtgttactgcnnnnnnnnnnnnnnnnnnnnnnnnnaaaaaagcctggttctttaatggtgtttttcctccgggttgagtgggacaactaaagccgcgtgatgatgcggatgaaaatattctgggtctggggtgtatacaatggaattggtcagtcttcagacctcagggtcgttaagaaaatagggaactcacaaaccctgctgcgcactacatttacttctttatctggcaagtacagggagtccatacagtcaagaaacacacagatacacataatgctattgaggacattggtcattctgtaagaaaacagaatattatctagatttccagagttagtgcagaccctgtgataacagtctgtgggtttgtggccagcgccaaaggtgtgtgtattttcagaaatggtccctatttgtcagtgatagtgttttttttttcttaagtttgacaaagggggtggtaatatcacattctttagatttgaaataattatcagctccaagaatctgtgaacatagtaataacaataaaaattcaacatcgaccctccctaacctgctcaccatacctccccaccccatgcctctgaagaaagaggccatgaacctacgaggtggtaaagggggacacaggtcagggagtggagagctactcctccagcagctcagcacccacactgcccgcatgcgtgtggccaccgggaccagatcccgagtgattgtggcatacccctaatatttgagtagtttttaagctgtcagtctcttgtcataacctcctaccgccacccaaaaaaagtaacgaaagttgcagtaactgccagtgtttgcctcaccaaatttaaatcgttcccttttcagttagctatatacctgaatttgtttttaacaagaaactgtacatggccaggaaaaatggtactaccttggccaaagggtctttgcaaaaagctcagtcttcagttcttcactgtgacaaatgcttatcttgttcatgggaggggaaagatcagataaataggcaagaagtactctgttttaaataaagaataaatagtgtccgtttaaagcactttgtgcctcaactttatttttaaactgtaaatcattgctttggaaataaattcccaattataattgacccatatctagccaatatcaacaagttgggatggttaagtaaaatactttatttcaaaaagg

SEQ ID NO: 1838 - protein, 60 aa, Homo sapien
  Unsure 1818-1839, 3706-3726, 4193-4217: Unknown amino acid
DLFPPPCNFAFLISVFKYFFFFLSINVVVLWAEQGSTFNLQLSPTCMYLCRNQNVSNCLL

SEQ ID NO: 1839 - DNA, 1538 bp, Homo sapien
ggcgtcggtatggctttagaatcgatctgaataagttgaaagatatttgggaaatataggtctgttcatccaaagaattaaataatgtggctttgtcagcgatggagacaaataacatatcacaggttatttgtgttgtggtagatgccttttaacaaaaggcaatccctggagactgttgtagaaaaggacaaagcaaaacgggtgttttggttttgctttattttgattgattgttgtttgttgtcattactttctttgtacaatcacttttccatggtcaccctcttttctgctttatactaattgccctgttgaggtgtttccatgtcaaatgcagctcttgtcggaactgaaaatggcagtgccaagggagctgtgcaagtataatcaaagctggaagatttcctccatccacccgcaaccccaaggcttaagcattcccttaggaaccaaagctgactctttgggaaagttttcacagccttattaggttacaaccctgaagatgttttgttgttttgaccttaaaattttgtgaactgttttgtgaactgtgtgtgtgtgcacacacatgtgcaaaggagttgcttgcaccttgagagagtcaatttttctgcctaagtgaaaggtcaggaactgcagttaacccagagtaaaatattggttgggtgaagggctcacttctagtatagtcagaatgggctcaagatcttaggaggatgataggtgatgaactgcttaaggtaggtactgttgtgtttgtgctttgtctcatgtggacaaattaccttgttgcatatgtgagttatgtggacataaacatatacagcagttactccctgactggctggctttcttaaagtgatagtcagaatatagcctgtactgtcagatatgaaagatcaatataattgaatgaaaaagaaagctgaaggacaatccaagaataatacaaacataagctattttaaaacattagagggagtgctttatgcaaaagagaaactgaatttattgtttcattctctcttctctcccttcacccctttcaagaaaacgcaaagccacaagtgagtggttgtatgtgtctgatggcttatgtaaacatagaagaagtcttcagatggctaaaataaacatgcgcgtgttaccaaaggatatgtttacacaaaccatttgctcagcctctgaaataatgaataaatgaagattttactaaaataattgggaggatttttgtgtttctgcggatgccataattgaatggcaccaaagagacttttatcagctattttccgtgttacatgtgttagcagttcctttctgtgggttgaatacttcattctgtagttactttacacatgtttttctaagaaattgtcgtttattactgcaattctagagagttgcttgatttctcaagagaaatttagcagccagtaaaggttatttggatctggttggtcaggagagggaggacaaagaaaaagaataaaagaaacccagcggaaaggaaaaaaacaaaaacaaacact

SEQ ID NO: 1840 - protein, 52 aa, Homo sapien [sequence omitted]

SEQ ID NO: 1841 - DNA, 622 bp, Homo sapien
gatgagtagagtttaaaagctgtggagtgcacactgcagatgagcaaagcctatgggtataggcaaacatggtgtgtgtaggaggctcagtgagagtgaaggcttagctttggtatgtagtgaagaataagattgactacactggctggagctagcttttgaagagtcaaatccaggcagcatttagatcaggggttatagcccagcagcccatgggccacatctggtctgcagatgtatatagtttggcccacagaatgactaaaaacttgggctccaaatcaggagattgtacaagcagtatcagatattctggattactcagaatctggattactgagtggtggaatatctgatactacttgtccaacatttctacagggcatcaatgaactagggctgagatagtagctgccttgttagatgaggcatggctatccagtgcgctacagtttccacaactgcttgtataatagtttccctgacactcaaatcatttaccacttaccagctgaggtcacttgccctttatcaggacacttgcactgttgttttcctattctaattaggtatttctctgtgcccatgtccctatcaatagtagggaagatagaccaaaaaa

SEQ ID NO: 1842 - protein, 65 aa, Homo sapien
MRHGYPVRYSFHNCLYNSFPDTQIIYHLPAEVTCPLSGHLHCCFPILIRYFSVPMSLSIVGKIDQ

SEQ ID NO: 1843 - DNA, 1442 bp, Homo sapien
gtgtgagtcaccacacctggccaggatcacattattaaaccaaattaaagtttatgtgattggttgcaatatttgtctaattttatatgttttcttcaggaaaactttagaactcaaaaatcatttacagctgattaaatagcaagtaaaatgtacttgtggtcattgccgtataacattaggcacacgcttctaacacttctataatatctagattttatttacctcattttaacttgcaatgtctgtctatctcatgaactctccataaatccaagaactgcctgtagttttcaaaatgacatgtgggtttttactgttatcattgttatttcgatagggctttttcctgattttgggtatacaagttccaaacttgcataataattgctaacgcactaggcgatatctagggccagtctgttaaaggggacctctaatgtagctataagacaggttggtaaagatgaactaacataagtttaagctaataattcagtagttgatgcagtatttcacagtagagcccgagcttactcatttttttcaaaatttggatcctgatactcctttttcagagttcagaactgaactgctcccctaagacctcagaatcttttgcattgagacatatgatctatttataaataaaggttatcaaatatcttgttgaactaattaggttgatcaaattaggatcccaaatattggggtccctgacatctgagcctttatctaaaaatgtttctgtaacataatgacagcctttatgtttgttaattgcctatagtaaagaagcaattttaagcctattctcatttccctctcccctacaaaaaatgataaaagctttccaattacttacatatgctctaacaagtgtctcaggattcattaacagaattttatagagtacagtaattcaaatatagcacagtacagagtttaccaaaaacacataaaactttgctagatagacagtgaggtggaaaggaactaaaatgtatctctcttgaatagcatttggggttcaattgaatttgttgtgtttacaacagcaaagcaccgttagcctggacagttgcttatggcatcgatagggttggataatattctgggatttgttgcagcagaattcctctatctgatgatcagcagttgaacataaacttcataattatagtaaaatttaggaaaaactatgagtgtgaagagtatgaactgattgggtagattaggcagagtgcattatgggcaagacaaaggttttcgatattaacttcttttaaaataaactttttattttcaaacagtttcagttttacagaaaaaatgtgaagctagtacagagaggtcctcatttaccccacacccagtttctcctgttattagcatctcacattaatatgtggtatatttgttacaattaataaaacacattg

SEQ ID NO: 1844 - protein, 46 aa, Homo sapien
CESPHLARITLLNQIKVYVIGCNICLILYVFFRKTLELKNHLQLIK

SEQ ID NO: 1845 - DNA, 1413 bp, Homo sapien
gatttatccaaaagaagtaagagaatagtgtaaagattctactcacatgcaaggatgtttgtctcagtggcattaaatatatgaataactgaaaataaactaaatgttccatgacagggaagtaattaaatgatgtatgatccattactgtgatacaatgtaccataattgaggacaatggaaacaatgatcacacacagacttcgcagtcagaaagacgtggatccaaatctcagctttgttcttgctgtgttaccttgggaaatcacagaaacctcaaatttctagcatatcaaataaggacaaattaggaataaattatataattcacataaagatcctagcttactgcttggctcatcagtatatcaataaccagcagctatcactattgtgatatgatgatggaatatcatgcaatcattttattttgaaaactttaattaaatgggaaaagacataaactatagtagtattttaaaactaggataggtttccaaattattataatctcacatttaaataaatatgagactatctgtaatacactaagatattgagtgataaatcctcggtaaatgaaatatttattcattgtgtgtttccatgttttcattttaccacaagcatttataatttataacattgagggaaaagttcatgtaaatgaaatacagagcaagaaaaactcacaggctttagaatttggggagcttacaggcctgtgaagaaaagccttttcatcttagctttaataaataaagttttcactgaacatattatatttacagtaaatgattaaattgaaagcaaaaagaaaatactgtatcatctcacattatcataactgagtgcattcatgtgcttttggtcttaaaattttactttaacgcacttaggatttgtcgtcagtaatttgttatgcactatctagactaagaataggtattaatttactagaattgtcaaatgaaatatttcaagcaaagtttgcataatgaatgcaagtttaaaccaattaaatgtgttcactttttagcaagctaagctgctccttatttctcctgtagtagacacaatcacagttaatctttgcacaatgcatcgcattctccatgcaacctaacagagcggtctgggatagagcctgaactttgggtcccttggggcccaacaggcaaggttcagatctgggctctaccacaaaccatctgtgtaacctgaacctccctagtcttcagtttcctcatctgctttaaaaaattgctagaacatagttctatgtaaatgttcggtgttaaaatttatttggtatctactgtatgtaagatatggcctctgctctcaaaaatatgtagtcccagaagtgatataatatgttcccggagacgtactattaaaaagtgccacaaa

SEQ ID NO: 1846 - protein, 41 aa, Homo sapien
MFGVKIYLVSTVCKIWPLLSKICSPRSDIICSRRRTIKKCH

SEQ ID NO: 1847 - DNA, 851 bp, Homo sapien
ttgaatgtagattttaataattgaatttattctgccgtgttgatagaataactgaatatcagtaaattgtgtaacagtggtggatactgttgcataagatgagctcctgaagagtgaagctaattctttggtcaatgttcttttcccctcagtgtctagtttaaggcttttagaagattgatctgtagcaattatttaatgaattgaatatttaaaaaattttttatttgctgtctttggtaattatctctctgcttgaaattaaatgcactataagttaatataacaagtaaaatacattgtcttttgaaaatagtttctttttaaaggaatactaattaattgtaacttgtaaaaccaaaagttctaatggtttttaaaaaccagtgttgagtggaaaagtgtttctttagtttggaaagacctgtgaagtatcctagtcagggaaagaacctgttttctggaagaatgtaagttgctatatgtggaggggcatgtaggacaggggttctaattactgtctgtgagagttactactttgtaacttatggtttctgcttcagtattgtgttggttctgtattataaattgcaccttaatagaccaaaaatatctatacagcactgatttccttgaatattgtgtgttaattgatatatcttctagaggcaaaaggtttaaatgtgttaaaatggttatattgcctcctttttaaacaaattaaagagttgtaaatactagtgtagatctcttttgtttaccacagcaaatactgattttatgattgttaagcatttcatattttaatttaaattggattcaaccacaataaagaaaatgagaaaagcttt

SEQ ID NO: 1848 - protein, 55 aa, Homo sapien
MVSASVLCWFCIINCTLIDQKYLYSTDFLEYCVLIDISSRGKRFKCVKMVILPPF

SEQ ID NO: 1849 - DNA, 329 bp, Homo sapien
aaggttggtgactgcttaattagaaagtgagcatagaacttatcccaatcagatttgatggatgaatgaaaggaagaaaactgactgttcttagtgtttgctggaaagaggaaaaccatgagcaatgggataaattaaacatttcagttgaataaatgtttaccaaattgctaataaagaataggctctgtacttggccttgggcaaacaatagtgtaaaatatacagtctgccctctagttgcttattggagtgagcatagtacattctgataaatgtacaagagctagaatccagaacatagaattttccttgtggatttgtttaaa

SEQ ID NO: 1850 - protein, 38 aa, Homo sapien
MFTKLLIKNRLCTWPWANNSVKYTVCPLVAYWSEHSTF

SEQ ID NO: 1851 - DNA, 273 bp, Homo sapien
atggctgaccaactcttgcgtaaaaagagaagaatttttatccattcagtgggtgcaggcacaataaatgccttgctggattgcctattagaggatgaagttattagccaggaagacatgaacaaagtgagagatgaaaatgacactgtcatggataaggctcgagtcttgattgaccttgttactggaaaaggacccaagtcttgctgcaaatttatcaagcatctctgtgaagaagaccctcaacttgcctcaaagatgggtttgcactaa

SEQ ID NO: 1852 - protein, 90 aa, Homo sapien
MADQLLRKKRRIFIHSVGAGTINALLDCLLEDEVISQEDMNKVRDENDTVMDKARVLIDLVTGKGPKSCCKFIKHLCEEDPQLASKMGLH

SEQ ID NO: 1853 - DNA, 310 bp, Homo sapien
tttttgaaggcttaagcaatcggggacgagctttattgaggcaatcacatccacatttcagttgtttgcaatgattggcaaacggatgagttaaaaaagccttctgcttccacactgttccgtctacattcagaaagcagtaaaaatatattcgtgcaatgaacactttccaccttaagcgtatcatgacagttcacaaatttgccaacagacaatgcaaaacaatatttacaagatagaccctttgtaagttccaaatttagatacttgtggtgtaattctaaaactaacatcgcatgtttttccaggt

SEQ ID NO: 1854 - DNA, 19853 bp, Homo sapien
ttccagctttcaggcagtcaccattgtcagtaaagtattagaaaataaaagcatacttgtggacattgtgttaaggcacactaggcagttcctagaattctttggagtgtagattctctggtcttaagaactgctgcaacattgcaaagcaaatatccacaggcttagaaataggaatttcatttgatgggagagaacatgattttcatataaaattttggatgaatcaagtattaacaaagaagtcaattttaaaaatagttttttttttacatttgaaaatacagcaatacactgcataaacaggtgtttccagttatatatgcaaatcatgaagccatttttggtttcttgtacaagatgtaggaaatgtcagaggaaacattaaaatgccattgtataaatttacatgtaaaattgaattctgctttgtacaaaactaatattcacgaagaattaatttcagagtactgctactccagtctttatatataccgaaacttgtatttttttaacttttattgtgcaacaatgtatcagaaatcagaaatttaacccatattgtcacaacgtataaagaaccaacaggttcctaatgatcgcatcagctgaaaaatcaaccttctcaaaattaaaaatgagcaaaaattacttaccatgcatttgccaagaatacatgttactttcaattatatattgaaaataaagttgctaaaaatataaattttgatgacttaaatgaatttgcaaaaagagggccagaaaatcttatgatcaatcaagatatcatattaaaaactattagtaattattgtatcatttaaagttattgcaacaaaactttttttgtgatttgtaaatttgttattatatattacgattatacctattacattttacaagtaataaaatatattaaaagaaaaaagcataatttattttaccttttactatacttctttttatacattctgagtaactgcctcacatttttattttgcactggccccatcaattatgtagtcatctctgccctgtattaaaaagaaaaaaacagaaaaaaagtcaaatccatatgaccatttcaatatatgcagacaaggcatttgacaaaatttagcatccatttctgattaaaactctcaaatgaagaatagaagataactttctttaatctgataaaagtcatctatagaaaatgtacaattgacattgtatataattgtgaacaacggaatgatttctttccaatatcaggaacatgacaaggatgtccacccatacttgatagtgtaatatatactacttagtataaccagggaagaaaaagaaaggagattagaatagaaaagaagtagaaatgtctttattcacaaaagataatattatctatgtaggaaatctaatggagtcacccaagaaaaagaatgggaaaaataatgactataattattaagtgtagctaggtggcaggagaaaaatatgtaaaaatgaattttacttctatatattagcaatgatcaattggaacttgaaatttttaaaagttccatttgcaatagtatcaaaaatattttttttgcagctatgtctggcaaaagatgtgaaagaccacactagaaacaataacccactgcagagagaaattgaagacctaaacaagtggaactccctgcttatgtcagaaagctcaatattgctaacatgttttgttgttaacatgacttatagattcaaaataatataattccatgtagtaattagcaggatttcttgtagtaattgagtacgtaattctaaactttatgtggaagtagacaggaaacttgtctactttagttactctacttctagagtaactaaaactttgaaaaataaaagctgagttgtatggataggattacctgatttcaagactcaaagtaaaagtttgctgagacttggtctttttgtccagagtactttttcttcaattttcacatctagtagttttattaagctatgttttggagaaaactgttgctgaacatttttcccaggttcatgatggttcctttgaatatgtggatcaggtcttttatttttggacagttttcttagattatactttttaatattagatttattctgttgttttttcttctttaaggactgcaataacatatatactatattataattttatttatttatttaattgtagaccatctttatccagaactttctttctgatccaattttcttttttcttactcttttaaaattattgcttcttctttttcttgtttcattctcctttgcaatgctgtttattcaagtttcagtcaagtgtagtttcccctttggctctgtattagttgactcaggctgctgtaacaaaattcaacagactgggtagcttaaataaattttctcacaattgtggaggctggaagtctaaagtcaaggtgccagcagggttggtttctggttaggtctcactccttggcttgcagatggcattttcttctggtgtcctcacacagccttttctctgtgcatatgaccagtggttgggggtggtgggttgggggagaaagagagctcatgcatgtgctttccagtatcctcttcttcttataaggacaccaatgccattgtatttgtgtcttacccttatgacctcatttaaccttagttaatctccttaaagtccccatcttcaaatacagtcacactggaggttggggttttaacatacacatttttggggggcacagtttagtccataacagattccttaataaggaatgtctttaataagtcttaataagacttgaattacaagtcttattttctgtgattactctgccctctttacaacttcattcctgagtttgattaccctttgcctctttagtttgcatacagtccaagtctcttctcttggatttcccactaacctgagctttaatctacgtgaactcagacatcttctgagtattttcccactcatagtgaaactttccctttctgggagtagttttgtgtttcatcctctctgggctgtgtgtctcctctattccatgtaatcaccacagtctctggctgactctctttgtaggcatgggctgtcacttttttctgtatttgagtatctgttgcttagtggtgatttgaaattagtaatattctccatctcctagttatgttaaagtcatggattgtttagatagtgttatttgctccacttatggtgacctttataattcttgggaggatgcatggggaaacgcagatgtaagcagctgctattattcttcttacactagaaaccaaatgtgtgccttcaatagttaaattcctctctgtttttccactagcctaggacttttgtttctggtttttgtttttgttttttgaccccaaacccatgaaatacaaaaaatatgcacttgcaattatgttcatctctggaaactggccaaaaaaccagtcagctgcaacatggggcatttgtttagcgatttcattccctaagaaatgttttggtatttatgtggtaagattaattttgcttgtttctagaagtctggacagctgatcacctgaaagagaggagccaagaaaaccaatctaaacatttgtgggaagttgtattcatcaataatgaaatgctgactaaggaacaaggtgatgtaataggaataccatttaatgtggatgtaagttcttttccttccagaaaaatgttctgtcagtgtgattcatgtggaatgagtttcaacactgtttcagaattggttatcagtaagataaactatttaggaaaaaagtctgatgaatttaatgcctgtgggaaattgttactcaatattaagcatgatgaaactcatactcaagagaaaaatgaagttttgaaaaataggaacacactgagtcatcatgaggagactttgcagcatgagaagattcaaactttagagcacaattttgaatacagtatatgtcaggaaaccctccttgaaaaggcagtattcaatacacagaagagagagaacgcagaagagaataactgtgattataatgaatttgggagaactttgtgtgatagttcatccctcttgttccatcagatatctccgtcaagggacaatcactatgaatttagtgattgtgagaagttcttatgtgtgaagtccaccctttctaaacctcatggggtatctatgaaacactatgattgtggtgaaagtgggaataatttcaggaggaaattgtgtctgtcacaccttcagaaaggtgataaaggagagaaacactttgaatgtaatgaatgtgggaaagctttctgggagaagtcacatctcactcgacatcagagggtgcacacaggacagaaaccctttcaatgtaatgaatgtgaaaaagctttctgggataagtcaaacctcactaaacatcaaagatcacacacaggggagaaaccttttgaatgcaatgaatgtgggaaagcctttagccataagtcagccctcacattacaccagagaacacatacaggggagaaaccctatcaatgtaatgcgtgtgggaaaactttttgccagaaatctgacctcactaaacatcagagaacacacacagggctgaaaccctatgaatgttatgaatgtggaaaatccttccgtgtgacttcgcaccttaaagtacaccagagaactcacacaggtgagaaaccttttgaatgtcttgagtgtgggaaatcctttagtgaaaagtcaaatcttacacagcatcagagaattcacataggagataaatcttatgaatgtaatgcatgtgggaaaactttctaccacaagtcattactcaccaggcatcagataattcatacagggtggaaaccttatgaatgttatgaatgtgggaaaaccttctgcttgaagtcagacctcacagtacatcagagaacacacacagggcagaaaccctttgcatgtcccgaatgtgggaaattctttagccataagtcaaccctctctcaacattatagaacacacacaggggagaaaccctacgaatgtcatgaatgtggaaaaatcttttacaataaatcatacctaactaaacataatagaacacatacaggggagaaaccctatgaatgtaatgaatgtggaaaagccttctaccagaagtcacaactcactcagcatcagagaattcacataggggagaaaccctataaatgtaatgagtgtggaaaagctttctgccataagtcagctctaattgtacatcagagaacccatacacaagaaaagccctataaatgtaatgaatgtggaaaatctttctgtgtaaaatcaggacttattttccatgagagaaagcacacgggggagaaaccctatgaatgcaatgaatgtgggaaattcttcaggcacaaatcatcactcacagtacatcacagggctcacacaggagagaaatcttgtcaatgtaatgaatgtggaaaaatcttttaccgtaaatcggaacttgctcaacatcagagatcacatacaggggaaaagccctatgaatgtaacacatgcaggaaaactttctctcaaaagtcaaatctcattgtacatcagagaagacatataggagaaaaccttatgaatgaaatggatattagaaatttccagccacaagtcagcctccataatgcctcagagtattcacactgtggagaaagccctgatgacatcctgaatgttcagtaactatccacaaactcaccttatgttactccaaagtaatagtaggggataaacccatagactacaacaattataggacagcttttgttaggaagtgatattctatgtaatatcagatggttaatacgggcataacaccttacagattttttttgaatttgtgaaagtttttggcaaaaatgcaaataaggttatgttagaatttacactgaggagaaaattgtcaatttaagaaatctaaagtgaaaattttgcttagaaataaaatacgacaagttatgttttgagtttgatgccataatagtttttagggcacctaacaataatttatagatgtatattgtggaatgtaaagctttaagaacttaaacaaaggtaataattaaaataacctcacaagaagtttaatgagtagagagaattcccatgtacacttcaccaaacttcctctaaggataatgtataatcatagtatatggtcaagtccaagaaatcgatgttaccttgctggtagatagagacttagtcagattttactatggtttgcatgcactctgtgtgtgtgtgtacgtgtatgtgtgtgtgtgtggttatatcaaacttttacgacttttacatttgagtaaccatcaacacgattagtttacagaactgaaaaggaatctgagatctgtactgtatcaggattacaaaggatttagcctcaagtagttccctttttgtattaataaccacacgctttctgcaaccctatcccttgcatccacttgactatgaagtttttttaaagcacagataaattgaataatcagggcaatagcattaagcacatctgcgaattatccctgaagttcaaaagacttatatatgtataagtggtatgtgatataaatcgtgtgtttcatatgcataatggaatttaacgtaattgtgaataggaagtaggtatcctagtttagtagtggttacattatcaggcccatcccagatgtttgtgatgtcctgaaacaatttaaaaggagacccacagagctaatgtttatccatttaaaaggtataaatcaaaataacaaattatctaaaaaaaatctatcctgtacatgtgaagatctaggctcgcctccatgttactccctttctcttcctacctgtggctcatgccatgccatgaagtgcctagggtacatatgtgaacattccagccttcagcataagtggtagtccaaattttctttaagcagctgctctccaagacagggccctggaaaggcccacacatacagcccagggctgcccagggctgttggactgtcatttcaaggctcattgtccccagacagggatctgggccctcagacttttgagaatatgaagaggagggttgaggctggagcagaaccagaatcaagctggtgtggggcttttattgatagtgtgaagattgtacactatattacatgatcagatcatacaaataatctaagattatacagtctagtgatcctagattacacaagtaatctaagcttccactttaggaaactagaaaaagaagagcaaattaaatccaaagtaacctgaaaaaacattagagtaaaaatcattgaaattgaaaagagaaaatcgataaaacccaaaactggttccttgaaaaggtcagtaaaattgataaacctctagctagcttaagaacaaacagaagacaaatattgctaataccaaaaatgaaagaggccatcacagctaatcctatggtcaccaaaaggattagaaagaaacatggacaactctgtccataaatttgataacttagctaaaatggaccaattccttgcaagacgcattctctcaaagctcacacaagatagacctcaataggcatatgtatctattaaataaaccaaagcagtaattaataaccttccaaggccaggtacagtggttcatgcctgtaatcccagcacttcactttgggaggctgaggcgggtggatcacaaggtcaggagttcgagaccagcctggtcaacatggtgaaaccccctatctactaaaaatacaaaaaattagctgggcatggtggcatgcgtgtgtagtcgaagctactcaggaggctgaggcagaagaatcacttgaacctgggaggtggatgttgcagtgagctgagattgtgccactgtactgcagcctgggtgacagaatgagactgcatctcaaaaaataataatgaaactttccaaaacaaagtgccaggaccagctgggttcactgatgtgtttttgagatacttaaggtagaaatgataccaagtctctaccatctctttcagaaaataaaagcagagataacacttcccaactcattttgtgaggccagtattaccctaatagcaaaaccaggcaaagatattacaagaaaggaaaactacagatcaatatttccattgaacacagatgcagaaatcctcaaaatattagcaaatcaggaatgcaaggcttgttcaacatttgatattcagtgtaatccattgcatgcattagcagctcaaagatgaaatacgatcatatcaataggtacagaaaaagcatttgacaaaatccaatatccattcatgttaaaacctctcaacacagaaggaatacaggagaacttactcaagttggtaaagaacatactacaaaaaaccctacagctaacattatccttgatgtttccaactagacactttcctactaagatcaggaacatggcaaggaacaccacaccactgcttttcagcattgtactggaagtgctatataatgcagtgttaaaaaaaaaagaaataaaatgcacatagatttgaaaggatgaaatacaactttgttcacaagtaacatgattgtctttgtagagaattctaaataacaaaaaccctgctgacattaataagcaattacagcaggattgcaggatacagtcctcaggtagatgataaaaaggaattggacatcaagtcattaaaagacacggagaaaccctaaatgcttattgttaagtgaaaaccaatctgaaaaggctttctattttgtatgattgcaattatatgacattttgggagaggcaaaactattgagccagtgaaaggaccagtggttgctgagagttgaggggaaaggagggatggcaggtagagaggtgatttttaaggcagtgaaagtactctctagggtactgtaatttgtcaaaacgcagagaatggaaaacagtgaacggaaaacacagagtaaaccctaatgtcaactctggacttcagttaataataatgtatcactgttggctcattaattgtaacaaatgaaccataatgatgcaagatgttaatgattggggagcctgtggaagatgggaggggaaagggttatatgagaattctctatactttttgctcaactttctgtaaccctaaagctactctaaaaaatgaagtgtatcaagtaaataaataaccaaccaaccaaccctgaggaacatcttgtttctgtactaaggtgttcttttgttagttgtatgtttctgactgaacatgtaaatcatcattagtgaacaattgaattgcttttgtacatccttaatatattttaaattatggtaactgtgacctgaaattaaggactagtatttttggttctcttgacatctgaagccaatagggcctcaaatgacctaacctcatttccatccccactctgcttccacaggtgaggtaacttagcagacagtcctccttgtcaggggggccaggcacaattcctgcttattcctaagtagtaagatttgcttccctgccagctcttggaattatcaccaaacccctcacatcctcccacagcaaacagtggtcactgtactctggataatacagctgctcgccacaacccctccttttccactctgctccctagtcgaaccctgtgtggctcttcccagcatgtggtgtccttctcacctttctgagagttggtgtgactgacaaactcacctagatcttatctgtccagtgtcaggcgttcagtgttcaacctttctatagcattggggtggggatccttccttcaccatcagggtgaaaaggaagcagttacaaccattggcataaacaggatggcccatccgaagccagggtcatccagtccaattttaactaactgctcttagctaactgacaggttccatattatggcaaaggcttcttggacagaaccaccagttgctggcaggtttgcacttggcctgtgctgtaatgcacttttcttgggggaggtgagtgtcgcatctcttcccattctaaaatgctgttgtgcacaggacaagagtgctcacccattggctgtatcccttcatgacttgacttgggctcagcctgtttggcaggtggtctctgaggctcccacctgtacaggtagtgaccacactgtacagcacttgacagtcactgtacagtgacgaactgatcagcatttgagccccactttccaaaggtctggctggagctctctgattatcatcactggctgcatggaacatccctacagactattgtttgttactgcacacccctggcttgggcatgcagatggcctattgtgaggtttgtggaaaggcaggagacaactgagggaggtgagtgtggcactccagttgcctaacaaggcattcaggaagggtagtacctgcatccctttcctgtgctgctccttcacttgctgccaccacacatgctttcctgacccctaagagtgtcaagatgcacatgcatggtggcccatggtccaggtgctgatgagaagagaaaaggataccagttctccccagattaccagaggaagtaatctctgtaactctcctgccctcccaatgcaaaaccccttgccagtgtgcctgagcgtggcctggcattgctgcttgccaacatgccacagggtcaaccttgcaatcatggggcctgatggcctacacctgggccacagactacatgaccttaccttgaacatagggagagtgactgtgacatccaatatgctttgagtgtttgtgccccctccaaaagtcatgttgaggctgggtgcagtggctcaacaaatcccagcactctgggaggccaagcacaaatcccagcattttggtaggctggggcggcaggatcacttgaggtcaggagttcaagactagcctggccaacatggtgaaaccccgtctctactaaaactataaaaattagctgagcatggtcgtgcctgtaatcccagctagttgggaggctgaagcaggagaatcgcttgaacctaggaggcagaggttgcagtgagccaagttggtgccactgcactccagcttgggcaagagagcaagaccgtctcaaaacaaaacaaaacaaaaaacaagtcatgttgaaactgaatcctcagtgcaatagcttgcaaaggtttggcctttgggaggtggtaaggtcatgagagctctacctcatgaacgattagtgatcttaggagccagctggagagaacacgctagaaccctttctgcccctcccctttctgacatgtgagggcccagtgtcactcccctcaagaggaaacagcaaggaggggctgccttggaagctgagacctggccctcaccggatactcacctttctggctctttcatcttggacttccctgcctccagagctgtgagaggtaaatttctattgtttataaatgacctagtctcaggtggtttgttatagtccatggttcacacaaatggacgaagacaaaatgtctcttggaaatttggcatttggccatgctacactctcatctctgcacatgaggaatatgttgggacactattgaaaaaaatcaaactcaacacctaacggcatggtcccaatgctgcgtaagacatttgtcagattattttcaggggaaactgtgagactattatgagtgcgtgtgtatgggcatgcagcctctgtgtatgtgaggtgaggttgggagagagatttgtaataccccagttaatagaatcaatctgaaggattgcttgagcccaggagttcaaggctgcagtgagctatggtggtgccactgcactccagcctgggtgacagagtaagactctgtctctttaaaaaacaaaaggctgggtgcggtggctcacacctgtaatcccagcactctgggaggccgaggtgggcggatcacgaggtcaggagattgagatcatcctggctaacacggtgaaaccctgtctctactaaaaatagaaaaagttagctgggtgtggtggcaggcgcctgtagtcccagctacttgggagactgaggcaggagaatggcatgaacccaggaggcggagcttgcagtgagctgagatcacgccgctgcactccagcctggacgacagagcgagactccatctcaaaaaaaaaaaaaaaaaaaaaaaaaaaaaagaggaaaagtatcctgtgccggtcatctggaagtaaacagtgagtttggagtatgcacactctaaagaaaccctaaagcaaaatgcaactgtgtccgtgtgtagtaataacagactggcatctttgcagatacaagctatgaactagagcaaggcattctgactggtcccacaggttcacatggaaaggagatagcacaaatgaatgaaggaactgtgggaaagacagatatcttaataaatcacatttcctttttaaggatatttttaaggcaccggtggaagcagacatagcttggtaatctgtggtgtattctcggaaggtaccacttgaatgggaaagaggagacagacaaagacaaccaagaggcttgaacttgacaaaaattatttataacaaaatgggcagctttgtgcatagaggtgcatgtaaatatatacaaaatgctaatagtatcagaagatgaacatcctgctttgttcagtgatttcatggagttgttttgcatttccttgtcatgttctctgtctacatgtttaaagggaggattacatgtgaacactatccggtattatgcatctaagcttgtgttaccaatcattggtagatagatagtgaggtaacttctagttcccatctcctctggtaagagctaagatgcaaactctttgtgatgaactgacatcaagatgaaatatagcacccctgttttctctgcgtcagtctgccttcaggctcaccctgtgaactcaccaaagggagtgaagtgtggatgtgtctcttttacctattttcaccttggttcagttctggtttatgcattgtccagactacccaggatgtgacgattgcagggaggaggtcatgtttgtcataaaaatgctttggctccttaggattcagcaaaggtatccactgcctggtgtctgtggtgcctgcaggacagtgcattctgtaggaaaacaggaagaaaagagggctttcaggccatcttcacatcaaccctacgacagacattttcaaatattgttctcaccatccttactccctcccaggcccctgagatgctcatgcccttggattaaacccctgcagtgctggaagaagaggactctgcactgcctgccacaccaggactggaagatccatggccttcccttcttccaaactaccttcccacaagatggggatggtggtcacatctccaacactagcatgctgtggaagagacatcagcattcttgcaacaaatctggaaacagcctaaagagacatttctacttcaaagagttgcactgaggaagtgcactggcactgctggggactcacctggggcccagggctgaggcttctcgtgtccttggagctgctgtcctcccgaggagtgtccacactgcagccagctcagcctcaggtgtcttctctggttttgaaaccaaatctaagtgggaaaagaagattcaagttttatccgatttagtctacataattttaagtatctatttgagctcaataccaagaatcacttccttctctctcccatctgtgatctccagaggaaaggtccccgggctaggagacactggctggcatcctaaagccagagctggccaaagggtgtgtgtccactcttccttcacctcttccccaccccacacttgtttttgtctcacgctcacttgctctttctgcctccctctcactctttaggtctcacaaaggctttggccaaagactgactgactttccttggctctctgtcatctccccatagtcaaaagcatttcataacacacaatccatgtgaagggacctctgatgaaaatccatttaaagaggagctcactaattatcaatacttactgctgagcctggaatcattcatatatacctcagagttcattcattccagatgcaatactagataaggagactcctatgaaccaaatatctaactctgaatagatagtgactgtcataatcaaaccctgtggctgcctcctccttactggagggtgtagaggaatgcagttttttgtttgtttatttgtttgttttgagatcatctcgctgcaatgtccaggctggagtacaatggtgcgatctcggctcactgcaacctccgcctcccaggttcaaacaattctcctgccttagcctcccgagtagctgggattacaggcacacaccatcgtgccctggctaatttttgtattttgtgtagagacggggtttcaccatgttggccaggctggccttgaactcctgaccttggatgatcacccgccttggctcccaaagtgctgagattacaggcatgagccaccgtgctcggccaggaatgtgcttttaatcattccttagtgtttcatgtggggacttgataactcacgataaggattctatcctaaaagacaagcgatacctgttgacctgctcttatgtcccaggcagtttgtaaaactgttacatctgttctctcaatatgtcacttcaaatacgatcaggaaagaaagcttaaacatggctggaaatgtagaggcaacaaatacattagtgaacaccctggcagatccagcctcattctacatggtttcttgtgctttccttccgcaccaccaactccagtgggctggttgccagtgcaccagccaatttccatgtcttcccatgggacacactttttttttttttttgagacggatttttgctcttatgcccaggctggagtgcaatggccctatctgggctcactacaacctccgccaaccgggttcaagcaattctcctgtctcagcctcctgagtagctgggattacaggcacatgccaccacgactggctaatttttgtatttttaataaagacaaggtttcaccatactggccaggctgttctcgaactcctgcctcggcctccaaaagtgctgggattaccgacgtgagccactgcccctggcctgggacacactttcattctgggatttgatgtagcactctgacacctggactgggtgcataaagagaaggaaatacatcttcatctggccttcctgaaactcagaaccctgtatcccagagcttactcaggattatagcatttgatataaaaccctgaccataggcttttcttcgacacagtcccttttacttagttattgacagtctggatacacttctcctggtgtgattgtgatctttccagctatttctttcttaactggagaaacagaagggtttttttattatttatttatttatttattgagacagagtctcactctgtcacccaggctggagtgcagtgctgtgatctcagctcactgcaacctctgccccctgggttcaagcaattctctgccacaggtgcctgctaccatacctggttaatttttgtatttttagtagagatgtggcctcaccgtcttggccaggccggtcttgaattcctgacctcgtgatccacccgccttggcctcccaaagtgctgggattacaggcatgagccaccgcacccagccggttttatttttatatccattattccactcaaagtattccaaaacaggatcaggcattaaactctccagtgtgtaaagcccacataaaaacacttagtagaggccaggcacagtggctcactcctgtaaccccagcactttgggaggccaaggtgggtggatcacttgaggccaggagtttgagaccagcctggctaacatggcaaaaccccatctctactaaaaatacaaaaattagccaggtgtggcacacactggtaatcccagctactcgggagggtaagggatgagaatggcttgaacctgggaggtggaggttgtagtgagctgagattgcatcactgcactccagcctgggtgatagagtgagactctgtctcaaaacaaaacagtagaaaagaaacaaaaaccatgtgatgagaaacgggactttatggcagcactgacctcactgtcctcaatatgacctattaaagaacaagcattctgagcattctgtaatattggttccaggtatcaattacaacctatcatgatcatggtgaccctattacctatattctctagagcatgcaaatatgatttaattttctcctaccaggaaaaaggcccaatttcacttccttcccccatcaatgaatacaccagaccacatgttccatgattggtaaaaggcagagataggggtcttactttcagttcattcttaacatggtgtaattggagactgcttagcccagcttgtcttttttctttgaccccaaggaaatgaaacaaaaatacaagcccacctgtatcctagactccagactgctgatttctttggccagttgttctctggttggtatgccagagtaggagttctgcttaaacaatgcttgaagggcatccttttgactcgagttcaagacaattctttgttgagattctcttgggagacagcctggtttagagaaatgggtcaaagccataggaaggatttgttgtggattcacatctgtgattcagtgtatacaggccttctgttgataccgggttcaaggtgttgagtcccagtggtcactctgtgtttgtactttttggatacacactccatgattaactgggtgcagggcattacacagattagaaagggtgatagccttcatccagagatccacaccaaaaagtgaatctcatgccattcataacattgcacacaaacaactcagaaaccagttgaaaagggagacattgaacgaaacattcagtttcaaaatgtgaaaatcaaatttggactttctgggttaaacacatatagggcaagggttgaaagactacctgttgcgctctatgctctctacatgaataacagaatcaatcgttccccaaacctcagcatcacacagtatacccatgtaacaaaactgcacatgtaccccctgaatctaagataaaaatagaaattatttttaaaattgtcaaaaaaaaattaaagatgttatcttcaaagggtggtcattaggatgaaccttgatgtggtcggagggaggcatgtagctgagtcccagtgtttatatctggagaggagagtgaatggccttgcatcccccatgcagggacaatgaccagcagggtgtcaagatctgttgtaatatttgcaccattactgaagatctgtgtagcaaactggttcccagggaactcttggcaggaatcagaatgcatctatgtcactccttgtaaaattaaaaaggaaacaacaggaacaacaaaaaacccggcaacatttcctagtatttatgatgccagacattttctgagagctgtgtggcagccttcttagtggagaacacagtttttgtcccacatctccattcatctgggtcactgtgcttcactcacatggcattgcagtgctgtgagatacaccacagatacagtcagctttgtcctgggactggatgttagagatggttaaggagtggtcagcctcagacctggagcctgagaagtgatcagggatcccgtcccccttgccatggtttccatcactcttaagccacatcacacaccaagggtcttccctgaccatgctaccatgcagtggtgtaggtgctacgcttactgctcagtgtgcaggtgagtttgtctgaggctcccaggctggaagagggaccctgaaaacaaactcattacatcctggaggaaggagaagaggggacaattctgtcatgagcgagccagggatcaggatgctgagggccatcttggcctgttccatgaaggaggaggataaagaggaggagtacggtgtatgccacagtccagataccccagtgctctactgaggcagccatgctgcaggtctcttatccatcctccagtccctagagaaacaggggcccttcatgcaaacccttggccaaccaaaccctcgtggggtctttcctgccctgtgactaggtgtcatttctgggaggcgtgggcctgtgcttaccctggcttgaggctctgcaggggcccagggaggactcagctgctagcccagtgagtcctgagtggaggccaggatcagtgtctgtttccccatttccccagctgagagccccacaggtcccctcagggcaggcccacaggttatcctctctgtgactagaggaggagtggttttcacagaggctcctgcttccacctaagccaggacccctgcccactcactgcccaatgacagagtgaggttcttcctcagggcagccgcctgatgtctcagtctttagttttctatgtaggcctcctcattgggaacagggtgcacaattctcacttcataaggagttcttaagggaagggttatctcatatacaaattgcagctgaaataagcatacattatctacaagcaggggccattcagccctgaacccacttgccagggtactcatgaagccaggtttctctctccccacttgattgctcaggagatcagcatatagtgagcagtctggtgagtgctggggaggacaaattcacctgattgatagatccactgaattctctgtcaagtgaggagaaccccgggagtagaaggagaaagtactggagaatcagaagacttgggggtttttctgaagtgaggggttagagagattcactaaaggaaggggatgcaagtgacaacttacaagatctgaaaaacttcccatggctgtttggacatagagaacttgctgactaagtgaggaggtcacaggggagaaggagatggtaggaaagaaagactggagaatcaagacaggaaattgtgaatcagagatgaggaatgggagagggtgagtatgttccacactttatcaaagactggaggaggcgccagtggggacattgaacaggagtcagagggcaggttgaggtttggggtgtgtttactttcatttctggtttgtttcttaaagtggcacctctgtcagcatctcaactgtcctctctagccatcttcctacctggactaggaatttttaaatttaatttaattaatttatttattttgagatggagtcttgctctgttgcccaggctagagtgcaatggcatgatctcagctcactgcaacctccgcctccctggttcaagcaattctcctgtctcatcctcctgagtagctgggactacaggctcctgccaccacatctggctaatttttgtatttttagtagagatggggtttcactttgttggtcaggctggtctcgaactcctaacctcaggtgatccagccgcctcagcctcccagagtgctgctattataggcgtgagccatggtgcctggccctggaccgggaaatgtttaagtcaaaagtctagttctctccgcaagagattactctttggtttctgtctgctcatggctttccttcttgttttccaccattcttatgaatttgaggatattaaaatatgtatgggaaaatttgggggaaaggaccctttagaaatgcgaagtcaggtcctattccagacccacggaatcagaattcacactttacacgatctcagatgatgtgtgcgcacagtaacatctgaaaagctctggtctgactcaggcatgaaagcactggtgggtgtttgtga

SEQ ID NO: 1855 - DNA, 1231 bp, Homo sapien
  Unsure 281-412, 476-575: Unknown base
gcagcctctgatttcaactcaagagacagaagaggatcccaaattccaagcaactcccaagatgcaaatcaaaatatggaaatgttaaacaaattgaaggatttcccaatagttacctgcaacacctaaaggtcactgtttccaaatggtgcaagaactatgcaaacaatatgttggttgctgttaaattcaaggacaggacactattaacagttataacatttttgtatggacctttatgaatccgtgggaaactagagacgcgctgtcttagcttaggnnnnnnnnnnnnnnnnnnnnnnnnnnnnnnnnnnnnnnnnnnnnnnnnnnnnnnnnnnnnnnnnnnnnnnnnnnnnnnnnnnnnnnnnnnnnnnnnnnnnnnnnnnnnnnnnnnnnnnnnnnnnnnnnnnnncagtctcactgtattcttatatggcttttcctctgctcttgaggaggaagatttctctcttctnnnnnnnnnnnnnnnnnnnnnnnnnnnnnnnnnnnnnnnnnnnnnnnnnnnnnnnnnnnnnnnnnnnnnnnnnnnnnnnnnnnnnnnnnnnnnnnnnnnnactccaaatatttggagtcccataataaataaatatttggagtccaatgtgatagtatctggagatggggcctttggaggtaatatgggttagataggtcatgacggtagggccctacatatatgggatgggtggcgttataagaagaagagagaaatcttcctcctcaagagcagaggaaaagccatataagaatacagtgagacggccacttccaaaccagaaagggagcccccaccaggaaccaaattggctggcacttgatctgggactttctcatggctccagaaactgtggagaaataaatgttctattatttaagcccatggtagttttatggcatcctaagctaagacagcgcgtctctagtttcccacagattcataaaggtccatacaaaaatgttataactgttaatagtgtcctgtccttgaatttaacagcaaccaacatattgtttgcatagttcttgcaccatttggaaacagtgacctttaggtgttgcaggtaactattgggaaatccttcaatttgtttaacatttccatattttgatttgcatcttgggagttgcttggaatttgggatcctcttctgtctcttgagttgaaatcagaggctgcttgccgggcaaggtggctcacgcctgtaatccc

SEQ ID NO: 1856 - protein, 121 aa, Homo sapien [sequence omitted]

SEQ ID NO: 1857 - DNA, 4771 bp, Homo sapien
  Unsure 3258-3275: Unknown base
gcgtccgcggctgccgtctctgcttgtgcggcccgggccgaggaaggagaagtgggaggaggggggagctcggcgtcccgctccctccgcggctcatggcgacgactctcggcacatccgggaccctccggccgtggcggccgaggcgccggctgctcgggccccagccccggccgctgtggtgactccgccgcgcctcgccgtcgcccccgtgccgcccgccgcccccgccgcccccgccgccggggacatgtctaaccccggaggccggaggaacgggcccgtcaagctgcgcctgacagtactctgtgcaaaaaacctggtgaaaaaggattttttccgacttcctgatccatttgctaaggtggtggttgatggatctgggcaatgccattctacagatactgtgaagaatacgcttgatccaaagtggaatcagcattatgacctgtatattggaaagtctgattcagttacgatcagtgtatggaatcacaagaagatccataagaaacaaggtgctggatttctcggttgtgttcgtcttctttccaatgccatcaaccgcctcaaagacactggttatcagaggttggatttatgcaaactcgggccaaatgacaatgatacagttagaggacagatagtagtaagtcttcagtccagagaccgaataggcacaggaggacaagttgtggactgcagtcgtttatttgataacgatttaccagacggctgggaagaaaggagaaccgcctctggaagaatccagtatctaaaccatataacaagaactacgcaatgggagcgcccaacacgaccggcatccgaatattctagccctggcagacctcttagctgctttgttgatgagaacactccaattagtggaacaaatggtgcaacatgtggacagtcttcagatcccaggctggcagagaggagagtcaggtcacaacgacatagaaattacatgagcagaacacatttacatactcctccagacctaccagaaggctatgaacagaggacaacgcaacaaggccaggtgtatttcttacatacacagactggtgtgagcacatggcatgatccaagagtgcccagggatcttagcaacatcaattgtgaagagcttggtccattgcctcctggatgggagatccgtaatacggcaacaggcagagtttatttcgttgaccataacaacagaacaacacaatttacagatcctcggctgtctgctaacttgcatttagttttaaatcggcagaaccaattgaaagaccaacagcaacagcaagtggtatcgttatgtcctgatgacacagaatgcctgacagtcccaaggtacaagcgagacctggttcagaaactaaaaattttgcggcaagaactttcccaacaacagcctcaggcaggtcattgccgcattgaggtttccagggaagagatttttgaggaatcatatcgacaggtcatgaaaatgagaccaaaagatctctggaagcgattaatgataaaatttcgtggagaagaaggccttgactatggaggcgttgccagggaatggttgtatctcttgtcacatgaaatgttgaatccatactatggcctcttccagtattcaagagatgatatttatacattgcagatcaatcctgattctgcagttaatccggaacatttatcctatttccactttgttggacgaataatgggaatggctgtgtttcatggacattatattgatggtggtttcacattgcctttttataagcaattgcttgggaagtcaattaccttggatgacatggagttagtagatccggatcttcacaacagtttagtgtggatacttgagaatgatattacaggtgttttggaccataccttctgtgttgaacataatgcatatggtgaaattattcagcatgaacttaaaccaaatggcaaaagtatccctgttaatgaagaaaataaaaaagaatatgtcaggctctatgtgaactggagatttttacgaggcattgaggctcaattcttggctctgcagaaaggatttaatgaagtaattccacaacatctgctgaagacatttgatgagaaggagttagagctcattatttgtggacttggaaagatagatgttaatgactggaaggtaaacacccggttaaaacactgtacaccagacagcaacattgtcaaatggttctggaaagctgtggagttttttgatgaagagcgacgagcaagattgcttcagtttgtgacaggatcctctcgagtgcctctgcagggcttcaaagcattgcaaggtgctgcaggcccgagactctttaccatacaccagattgatgcctgcactaacaacctgccgaaagcccacacttgcttcaatcgaatagacattccaccctatgaaagctatgaaaagctatatgaaaagctgctaacagccattgaagaaacatgtggatttgctgtggaatgacaagcttcaaggatttacccaggactctatttatacaaccctgactgacagcctcctttcagcagagtttcaaagaatatgctgaaatacaggaaaacactcccccccccccccttttttttttttttttacattttaggacactgtgaggggaaaggacaattttgaaattccttttcaaggaaaaaaaaggtctttatgctttgccatgaggccacattcagctgctatttaaacttaatatcttgaacctaaagaatgctgacttttcctacatttccagagttaggcagtattctacacttaaagactactactatttttataaaaggtaatctattcaaatttcttcacagatttcaagtctctcaaacatcaagacaacttcagcagtcggtacaagtcacatttcattttgattgaatacatgatcttgaacagctcctgtacttgctctttgtaaaaaaaaataaaattattttgaattattctacctttgtaaacaattggctaaaagaatcatctttaagaaattaagccatttacatgtttgtgtttttctatagcagagcattatattttgcattatatgtttcaacctagtctaagtgggtcttttttacatttttcaagaacggatttcctggaatacagcgatataattttggttgtcaaattcctaatgcaaccatttagtctaaacttagtcatttatttgtgacaataagatgtgttcaggggctccctgtttttaagagacnnnnnnnnnnnnnnnnnnaacctaatgttttaatcttgagtcaatatgattaggtattttggatttacttttaatcttaaaatactgcatttttatagcttctcagagcatgtggatgggatgggattttcgttattttgctgggtcagcttatctttaatatatggactattcctataaaccaaagtctctgacaagtgcacctaatttatattgtattttaactacagtgtaagtttccattaacaaaaccatcctaaagcgttaactgctcataattttaatcagctacagttatgaaaaaggaagaattttgctctaaagattattaataagcttagaaaatcctgcttttacctaacagaatgaagtggggttgaggggcggtagtatgaacagtgattctaactctatggcgtaaattactttgaagagttcattttggaagtaagggaatcccgcttcccttggtgttgaagatctgcatctgattttgaaacgtccagatttagctttcaaggtgcgtgcatgttgaatgatccagaagcaacgaaaactctggggtgagggattgaaaaaatctgaaatcacagttggatttttaaattcaaccatcaaaaatatgtactatcagtttttttttacattgatgtgaaataagcaaattttcatgataattaagctgcaaaatttaaagttatcaagtaaataggtcctctgtgttctgtttcatgtgatggagtgggtttcagtctgtgttcttggagccaaagggttcctcaggggtgcctcaggagtaatggtttaagagaagaggggcaatgagagggagcgagggggaaggcctagttggtatttgagcaggggccttaggctccatatccccaccccctttacccagaacagcccatttttcttatgtatattggaatttcaagtaagctttcatggggtgcagtggggcggggaggaatggatgggataaaaaaagtggagattttgctgctttaaaaaagttgagaactacttgtgtagtttttaagtattttaatgtatttcatttggccaaattcaactgccacaagcaagctagtcatagttgtaactgtgcagtggtaatatgcttatgcctacctttttcctctcaaacaatttgttttttttacattgcattctgagtactgaagagcatcttgaaatgtatggaagtggtttctatgctatttgataatcagtaatgttcagctgtcatgatagtactttactggttgcagacccatctctcttttatattaaagcactagtgcagtttataattgtgcctacttttaaaatctttcagtaaaaaagtacataatgaatacagaaatcataactgacagggatacagtaataatgaaatgctactatcacttattttaatatacaatataaagcaggcaaataccattgctttttgagtgcctttttaactttatactaatgacttaatagagctttaaaagaaagaaatt

SEQ ID NO: 1858 - protein, 831 aa, Homo sapien
  Unsure 3258-3275: Unknown amino acid
RPRLPSLLVRPGPRKEKWEEGGARRPAPSAAHGDDSRHIRDPPAVAAEAPAARAPAPAAVVTPPRLAVAPVPPAAPAAPAAGDMSNPGGRRNGPVKLRLTVLCAKNLVKKDFFRLPDPFAKVVVDGSGQCHSTDTVKNTLDPKWNQHYDLYIGKSDSVTISVWNHKKIHKKQGAGFLGCVRLLSNAINRLKDTGYQRLDLCKLGPNDNDTVRGQIVVSLQSRDRIGTGGQVVDCSRLFDNDLPDGWEERRTASGRIQYLNHITRTTQWERPTRPASEYSSPGRPLSCFVDENTPISGTNGATCGQSSDPRLAERRVRSQRHRNYMSRTHLHTPPDLPEGYEQRTTQQGQVYFLHTQTGVSTWHDPRVPRDLSNINCEELGPLPPGWEIRNTATGRVYFVDHNNRTTQFTDPRLSANLHLVLNRQNQLKDQQQQQVVSLCPDDTECLTVPRYKRDLVQKLKILRQELSQQQPQAGHCRIEVSREEIFEESYRQVMKMRPKDLWKRLMIKFRGEEGLDYGGVAREWLYLLSHEMLNPYYGLFQYSRDDIYTLQINPDSAVNPEHLSYFHFVGRIMGMAVFHGHYIDGGFTLPFYKQLLGKSITLDDMELVDPDLHNSLVWILENDITGVLDHTFCVEHNAYGEIIQHELKPNGKSIPVNEENKKEYVRLYVNWRFLRGIEAQFLALQKGFNEVIPQHLLKTFDEKELELIICGLGKIDVNDWKVNTRLKHCTPDSNIVKWFWKAVEFFDEERRARLLQFVTGSSRVPLQGFKALQGAAGPRLFTIHQIDACTNNLPKAHTCFNRIDIPPYESYEKLYEKLLTAIEETCGFAVE

SEQ ID NO: 1859 - DNA, 3163 bp, Homo sapien
gaataaactctaggttcccatttctttcagccagatcctccccagggaatcactacaggctggttagccaaaaagtcctgattttctgctcaatagaggtccttactggaaggcagcatgtccaatgttaccttgagaaaaatgtctcccacaggaaatgagatgaagagcaccactcagggaaccacacggaagcagcaggattttcacgaggtgaacaaaagaagaactttcttacaggataacagttggataaagaaacgccctgaagaagaaaaagatgaaaattacggtagggtggtgctcaaccgacataattcccatgatgcattggacaggaaagtaaatgagagagatgtgccaaaagctacaattagtcggtacagttctgatgacactttggacaggatctcagacagaaatgatgctgctaaaacatataaggccaataccttggataaccaactaaccaataggagcatgtccatgtttagatcactggaagtaacaaagttgcaacctggcggttcattgaatgccaacacctccaacaccatagcatccacttctgctactactcctgtaaagaagaagaggcagtcctggtttccaccgccccctccaggttacaatgcctcttcgagcacaggaaccaggagacgggaaccaggtgttcaccctccaatacctccaaagcccagttctcctgtttcttctcctaaccagctgagacaggataataggcagatacatccacctaaaccaggtgtatatacagaaaccaacagatctgctgaaagaaatataagtgaagaattggataatctcatcaaaatgaacaaaagcttgaataggaatcaaggtcttgatagtctcttcagagcaaatccaaaggtagaagaaagagagaaaagagccaaaagccttgaaagtctcatctatatgagtacccggacagataaagatggcaaaggaatccaaagccttggaagtccgattaaagttaatcaaaggactgacaaaaatgagaaaggaagacaaaatctcgaatctgttgctaaagtgaatgccaggacgaataaaacgagcagaagaagtgaagaccttgataatgctactgaagtaaatcccaaaggacatgaaaataccactggaaaaaaagaccttgatgggcttattaaagtggatcctgaaacaaataaaaatattacgaggggccagagccttgataatctcatcaaagtgacccctgaagtaaagagaagtaaccaaggttccaaagaccttaataacttcatcaaagtgtatccaggaacagaaaaaagtactgaagggggccaaagtctcgacagcctcattaaagtgactcctgaaagaaacagaactaaccaagggaaccaagacttggaaaatcttatcaaagtgatcccttcagcaaacaaaagcagtgaacaaggtcttgatgaacatattaatgtcagccccaaagctgtcaaaaacactgatggaaaacaagatcttgataaactcatcaaggtgaatcctgaaattttcacaaacaaccaaagaaaccaagatcttgctaacctcatcaaagtaaatcctgcagtaatcagaaacaatcagagccaagacttggacaatcttattaaagtgaaaccttcagctcttagaaacactaatcgagaccagaacctggaaaatttaattgaagtaaattctcatgtgtctgaaaacaagaatggaagctctaacactggagccaagcaggcaggaccacaggatactgttgtgtacacaaggacatatgtggagaatagtaaatcacccaaggatggatatcaggagaatatctctggaaaatacatacaaactgtttattcaacttctgataggtctgtcattgaaagagatatgtgcacttactgccgaaaacccttgggtgtagaaactaaaatgattttagatgaattacaaatttgctgccattctacttgctttaagtgtgaaatatgcaagcagcctttggaaaatctgcaagcgggtgatagtatttggatttatagacagacaatacactgtgaaccttgctactctaaaattatggcaaagtggattccataactctggcacaaggaaatcaagatgaaaagcactcattaaggaattaaagttacaagttttatcttaataatatgtaatctagaaaagctttcacattgaagatcaactcttgtacaaaattaacaattctgttattgcataagtaatctaattgtcttcaataaggtcacacacataaaaagagccatctggtctctggctagagttagcaataaaaagttcaaatggttccagattccagtgtcaaaggagtgatgcattacactccagccaggtccatccctgctccgtatgttggctgtgagtggtggtttccatttaaaccaagtttctcatttcttcacctttttttctctaagaatttggattcgtagacattgacatcccgaagaactgtcaaggaagcaagatatgctttcttcatctgcaaaagaaatactaacaacaattttcttatacagtttggcagaaagatgttaacataaaaagtttatatacctcaaaaatcactaaactttccagatctctgtcctattatttgtaacacaaggggcattggataaaatgatttctagggttccttttgcttcccaaattctctgattctaaagcagtttttagaatcattagctctttggaaacatatatgcatacatgtttgttaagcctattgaactaggtaggacatataaacaatttaattttagtgtcattgtttaatcacagacttagtgtttgaaaactgtgttttaaaaacagaaacagattgatgggtaacaggtaaaatatgacatgtatagcttacatgttattatttgttaaattttctttgtatacatttcaaaatctgggtatacttataatccattagaagtaatggttatggactaaaaagatatgttctttagtatgttatatatactcatattacatagcagtatgtttacaaaaggcttataaaaataaaatgaactatcagttacttggaaaaaaaaataagggaaagaagagagaagaagaggggagatggggaaagttt

SEQ ID NO: 1860 - protein, 707 aa, Homo sapien
INSRFPFLSARSSPGNHYRLVSQKVLIFCSIERSLLEGSMSNVTLRKMSPTGNEMKSTTQGTTRKQQDFHEVNKRRTFLQDNSWIKKRPEEEKDENYGRVVLNRHNSHDALDRKVNERDVPKATISRYSSDDTLDRISDRNDAAKTYKANTLDNQLTNRSMSMFRSLEVTKLQPGGSLNANTSNTIASTSATTPVKKKRQSWFPPPPPGYNASSSTGTRRREPGVHPPIPPKPSSPVSSPNQLRQDNRQIHPPKPGVYTETNRSAERNISEELDNLIKMNKSLNRNQGLDSLFRANPKVEEREKRAKSLESLIYMSTRTDKDGKGIQSLGSPIKVNQRTDKNEKGRQNLESVAKVNARTNKTSRRSEDLDNATEVNPKGHENTTGKKDLDGLIKVDPETNKNITRGQSLDNLIKVTPEVKRSNQGSKDLNNFIKVYPGTEKSTEGGQSLDSLIKVTPERNRTNQGNQDLENLIKVIPSANKSSEQGLDEHINVSPKAVKNTDGKQDLDKLIKVNPEIFTNNQRNQDLANLIKVNPAVIRNNQSQDLDNLIKVKPSALRNTNRDQNLENLIEVNSHVSENKNGSSNTGAKQAGPQDTVVYTRTYVENSKSPKDGYQENISGKYIQTVYSTSDRSVIERDMCTYCRKPLGVETKMILDELQICCHSTCFKCEICKQPLENLQAGDSIWIYRQTIHCEPCYSKIMAKWIP

SEQ ID NO: 1861 - DNA, 1013 bp, Homo sapien
cccagccaggcctgaggacatgaggcggccggcggcggtgccgctcctgctgctgctgtgttttgggtctcagagggccaaggcagcaacagcctgtggtcgccccaggatgctgaaccgaatggtgggcgggcaggacacgcaggagggcgagtggccctggcaagtcagcatccagcgcaacggaagccacttctgcgggggcagcctcatcgcggagcagtgggtcctgacggctgcgcactgcttccgcaacacctctgagacgtccctgtaccaggtcctgctgggggcaaggcagctagtgcagccgggaccacacgctatgtatgcccgggtgaggcaggtggagagcaaccccctgtaccagggcacggcctccagcgctgacgtggccctggtggagctggaggcaccagtgcccttcaccaattacatcctccccgtgtgcctgcctgacccctcggtgatctttgagacgggcatgaactgctgggtcactggctggggcagccccagtgaggaagacctcctgcccgaaccgcggatcctgcagaaactcgctgtgcccatcatcgacacacccaagtgcaacctgctctacagcaaagacaccgagtttggctaccaacccaaaaccatcaagaatgacatgctgtgcgccggcttcgaggagggcaagaaggatgcctgcaagggcgactcgggcggccccctggtgtgcctcgtgggtcagtcgtggctgcaggcgggggtgatcagctggggtgagggctgtgcccgccagaaccgcccaggtgtctacatccgtgtcaccgcccaccacaactggatccatcggatcatccccaaactgcagttccagccagcgaggttgggcggccagaagtgagacccccggggccaggagccccttgagcagagctctgcacccagcctgcccgcccacaccatcctgctggtcctcccagcgctgctgttgcacctgtgagccccaccagactcatttgtaa

SEQ ID NO: 1862 - protein, 290 aa, Homo sapien
MRRPAAVPLLLLLCFGSQRAKAATACGRPRMLNRMVGGQDTQEGEWPWQVSIQRNGSHFCGGSLIAEQWVLTAAHCFRNTSETSLYQVLLGARQLVQPGPHAMYARVRQVESNPLYQGTASSADVALVELEAPVPFTNYILPVCLPDPSVIFETGMNCWVTGWGSPSEEDLLPEPRILQKLAVPIIDTPKCNLLYSKDTEFGYQPKTIKNDMLCAGFEEGKKDACKGDSGGPLVCLVGQSWLQAGVISWGEGCARQNRPGVYIRVTAHHNWIHRIIPKLQFQPARLGGQK

SEQ ID NO: 1863 - DNA, 984 bp, Homo sapien
accagatcccagaggctgaacacctcgaccttctctgcacagcagatgatccctgagcagctgaagaccagaaaagccactaagactttctgcttaattcaggagcttagaggattcttcaaagagtgtgtccacgatcctttgaagcatgagttcttaccagcagaagcagacctttaccccaccacctcagcttcaacagcagcaggtgaaacaacccagccagcctccacctcaggaaatatttgttcccacaaccaaggagccatgccactcaaaggttccacaacctggaaacacaaagattccagagccaggctgtaccaaggtccctgagccaggctgtaccaaggtccctgagccaggctgtaccaaggtccctgagccaggttgtaccaaggtccctgagccaggctgtaccaaggtccctgagccaggttgtaccaaggtccctgagccaggctacaccaaggtccctgaaccaggcagcatcaaggtccctgaccaaggcttcatcaagtttcctgagccaggtgccatcaaagttcctgagcaaggatacaccaaagttcctgtgccaggctacacaaagctaccagagccatgtccttcaacggtcactccaggcccagctcagcagaagaccaagcagaagtaatttggtgcacagacaagcccttgagaagccaaccaccagatgctggacaccctcttcccatctgtttctgtgtcttaattgtctgtagaccttgtaatcagcacattgtcaccccaagccatagtctctctcttatttgtatcctaaaaatacgtactataaagcttttgttcacacacactctgaagaatcctgtaagcccctgaattaagcagaaagtcttcatggcttttctggtcttcggctgctcagggttcatctgaagattcgaatgaaaagaaatgcatgtttcctgctcttccctcattaaattgcttttaattcca

SEQ ID NO: 1864 - protein, 169 aa, Homo sapien
MSSYQQKQTFTPPPQLQQQQVKQPSQPPPQEIFVPTTKEPCHSKVPQPGNTKIPEPGCTKVPEPGCTKVPEPGCTKVPEPGCTKVPEPGCTKVPEPGCTKVPEPGYTKVPEPGSIKVPDQGFIKFPEPGAIKVPEQGYTKVPVPGYTKLPEPCPSTVTPGPAQQKTKQK

SEQ ID NO: 1865 - DNA, 1180 bp, Homo sapien
gctgcctctgaagcgtacctgctcgcccttcactgaggagtttgagcctctgccctccaagcaggccaaggaaggcgaccttcagagagttctgctgtatgtgcggagggagactgaggaggtgtttgacgcgctcatgttgaagaccccagacctgaaggggctgaggaatgcgatctctgagaagtatgggttccctgaagagaacatttacaaagtctacaagaaatgcaagcgaggaatcttagtcaacatggacaacaacatcattcagcattacagcaaccacgtcgccttcctgctggacatgggggagctggacggcaaaattcagatcatccttaaggagctgtaaggcctctcgagcatccaaaccctcacgacctgcaaggggccagcagggacgtggccccacgccacacacaacctctccacatgcctcagcgctgttacttgaatgccttccctgagggaagaggcccttgagtcacagacccacagacgtcagggccagggagagacctagggggtcccctggcctggatccccatggtatgcttgaatctgctccctgaacttcctgccagtgcctccccgtaccccaaaacaatgtcaccatggttaccacctacccagaagactgttccctcctcccaagacccttgtctgcagtggtgctcctgcaggctgcccgttaagatggtggcggcacacgctccctcccgcagcaccacgccagctggtgcggcccccactctctgtcttccttcaacttcagacaaaggatttctcaacctttggtcagttaacttgaaaactcttgattttcagtgcaaatgacttttaaaagacactatattggagtctctttctcagacttcctcagcgcaggatgtaaatagcactaacgatcgactggaacaaagtgaccgctgtgtaaaactactgccttgccactcactgttgtatacatttcttatttacgattttcatttgttatatatatatataaatatactgtatatatatgcaacattttatatttttcatggatatgtttttatcatttcaaaaaatgtgtatttcacatttcttggactttttttagctgttattcagtgatgcattttgtatactcacgtggtatttagtaataaaaatctatctatgtattacgtca

SEQ ID NO: 1866 - DNA, 809 bp, Homo sapien
  Unsure 631-660: Unknown base
cggacgcgtggcttgtctgtttctgcaaaaaaaaaacaacaacaactggggattttggtagggatttcattgaatctgtagatcattggccacttgattttaaacaaaatattgagatatctacttcttgaaatgattgcttgagacagtacctgtgtactccttgctatgaaaaatgaggaagttaacatactcatcttccacctttccttttccttactttttttgttgaagtatcattgtggacactttcccagttgacttccacttgatcccctgaattaactaactggcactggcgtttcctttgtaaaatgtacaatgtcagccaccatcttgctactaaagtgtggcctgtggaccacaacatggggggaatctcaggtctcacctcagacttgctgggtcagaacctgagttttgagaggctctgggcaaccggcacctctcagacctgctgttgggttctcatcgatggacccgatgcttcctagcaaatgatacctgttgtatgtgttattggtaataacatagtttacttagctattacattaattaataaaacatgagcgctgaaagagttgtttctgtgaaaataagctgattgctttaaaaagataagagacaaatnnnnnnnnnnnnnnnnnnnnnnnnnnnnnncttttgggtgagacagtagtaaggaaatacagtaaaaatccagaagggctctgtgctctgatgcttcaggagtgtgtctaagttcttgctcgctttaaagaagctgctactagaaattatagatcatgattatcgatgtggttcataca

SEQ ID NO: 1867 - protein, 42 aa, Homo sapien [sequence omitted]

SEQ ID NO: 1868 - DNA, 1504 bp, Homo sapien
attgccttatgttggttttctcgaacacattggccgaatattggatcttcagttggaggacaacaaatgggcctgcaattgtgacttattgcagttaaaaacttggttggagaacatgcctccacagtctataattggtgatgttgtctgcaacagccctccattttttaaaggaagtatactcagtagactaaagaaggaatctatttgccctactccaccagtgtatgaagaacatgaggatccttcaggatcattacatctggcagcaacatcttcaataaatgatagtcgcatgtcaactaagaccacgtccattctaaaactacccaccaaagcaccaggtttgataccttatattacaaagccatccactcaacttccaggaccttactgccctattccttgtaactgcaaagtcctatccccatcaggacttctaatacattgtcaggagcgcaacattgaaagcttatcagatctgagacctcctccgcaaaatcctagaaagctcattctagcgggaaatattattcacagtttaatgaagtccatcctttggtccaaagcatctggaagaggaagaagagaggaatgagaaagaaggaagtgatgcaaaacatctccaaagaagtcttttggaacaggaaaatcattcaccactcacagggtcaaatatgaaatacaaaaccacgaaccaatcaacagaatttttatccttccaagatgccagctcattgtacagaaacattttagaaaaagaaagggaacttcagcaactgggaatcacagaatacctaaggaaaaacattgctcagctccagcctgatatggaggcacattatcctggagcccacgaagagctgaagttaatggaaacattaatgtactcacgtccaaggaaggtattagtggaacagacaaaaaatgagtattttgaacttaaagctaatttacatgctgaacctgactatttagaagtcctggagcagcaaacatagatggagagtttgagggctttcgcagaaatgctgtgattctgttttaagtccataccttgtaaataagtgccttacgtgagtgtgtcatcaatcagaacctaagcacagcagtaaactatggggaaaaaaaaagaagaagaaaagaaactcagggatcactgggagaagccatggcattatcttcaggcaatttagtctgtcccaaataaaataaatccttgcatgtaaatcattcaagggttatagtaatatttcatatactgaaaagtgtctcataggagtcctcttgcacatctaaaaaggctgaacatttaagtatcccgaattttcttgaattgctttccctatagattaattacaattggatttcatcatttaaaaaccatacttgtatatgtagttataatatgtaaggaatacattgtttataaccagtatgtacttcaaaaatgtgtattgtcaaacatacctaactttcttgcaataaatgcaaaagaaactgg

SEQ ID NO: 1869 - protein, 160 aa, Homo sapien
MPPQSIIGDVVCNSPPFFKGSILSRLKKESICPTPPVYEEHEDPSGSLHLAATSSINDSRMSTKTTSILKLPTKAPGLIPYITKPSTQLPGPYCPIPCNCKVLSPSGLLIHCQERNIESLSDLRPPPQNPRKLILAGNIIHSLMKSILWSKASGRGRREE

SEQ ID NO: 1870 - DNA, 1648 bp, Homo sapien
gggagaggccacagcccggactccatcgactcccccggctcttagactaaaatcatgcccaagttcaaacaacgaagacgaaagctaaaagccaaagccgaaagattattcaaaaaaaaagaagcctctcactttcagtccaagctaattacacctcctcctccaccaccctcaccagaaagagtcggtatttcttcaatagatatatctcaaagcagaagctggctaacatcatcctggaacttcaattttcctaacatcagagatgcaataaaactttggacaaatagagtatggtctatatacagctggtgccagaactgcataacccagagtttagaagtattgaaagacaccatctttccatctcgtatctgccaccgagaactttacagtgtaaaacaacagttttgcattttggaaagtaaattatgcaagctccaggaagcactgaagaccatctcagaaagttcttcctgtccaagctgtggtcaaacatgtcacatgagtggtaaacttacaaatgtgcctgcctgcgttctgatcacccctggagactccaaagctgtgcttcctcccacactgccacagccagccagccattttcctcctcctcctccacctccacctctgccacctcctccaccaccactagcacctgtgttgctcagaaaacccagtctcgctaaagcacttcaggctggaccattaaaaaaagatggacccatgcagataacagttaaagatctgctgactgtaaaattaaagaagacacagagtttagatgaaaagaggaagcttataccatcgccgaaagcacggaatccactagttaccgtctctgacttgcagcatgttaccctgaaacctaactccaaagtgttatcgactcgagttacaaacgtcttaatcactcctggaaaaagtcagatggatctgcggaaactgcttagaaaagtcgatgtagagaggagcccaggtggaacccctcttaccaataaggaaaatatggaaacaggaacaggactgactccagtgatgacgcaggccttaaggagaaagtttcagctggctcaccctagaagcccaactccaactctgccactttctacaagcagctttgatgaacaaaactgatgccaactctgcctcactccatgagatgatccataacaaatacagataaaaacacccagctgggtgcagtggctcacacctgtaatcccagcactttgggaggctgaggcaggtgatccacccatctcggcctcccaaagtgctgagattacaggcgtgagccaccacgcccggccagagatccacatctatatttataacacatttatggatgaaaattaaacaggtgtccgggtgcggttactcatgcctgtaatccgagcacttgtggaggccgaggcaggcggattacttgaggtcaggacttcgaaaccagcctggccaacatggtgaaatcccatctctactaaaaatacaaaattagccaggtgtggtgtcacgcacctgtagtcccagttacttgaacctgggaggcagaggttgcagtgagccgagattgcaacactgccactccagcctgggtgacagagcaagagaccctgtctcaaaaaaaaaaaaaaaaaaaaaaaaa

SEQ ID NO: 1871 - protein, 360 aa, Homo sapien
MPKFKQRRRKLKAKAERLFKKKEASHFQSKLITPPPPPPSPERVGISSIDISQSRSWLTSSWNFNFPNIRDAIKLWTNRVWSIYSWCQNCITQSLEVLKDTIFPSRICHRELYSVKQQFCILESKLCKLQEALKTISESSSCPSCGQTCHMSGKLTNVPACVLITPGDSKAVLPPTLPQPASHFPPPPPPPPLPPPPPPLAPVLLRKPSLAKALQAGPLKKDGPMQITVKDLLTVKLKKTQSLDEKRKLIPSPKARNPLVTVSDLQHVTLKPNSKVLSTRVTNVLITPGKSQMDLRKLLRKVDVERSPGGTPLTNKENMETGTGLTPVMTQALRRKFQLAHPRSPTPTLPLSTSSFDEQN

SEQ ID NO: 1872 - DNA, 2111 bp, Homo sapien
tgccaaggctgcaaaagcttcaaacacttctacacctaccaaggggaacacggaaactagtgccagtgcatcacaaacaaaccatgtgaaggatgtgaagaaaattaaaattgaacatgcaccttctccctcaagtggtggaactttaaaaaatgacaaagcaaaaacaaagccacctcttcaggtaacgaaggtggaaaataatttgattgtagataaagccaccaagaaagcagtcatagttggaaaggagagtaaatctgctgctacaaaggaggaatcagtatctcttaaagagaaaaccaaaccacttacaccaagcataggagccaaggagaaggagcaacatgtagctttagtcacctctacattaccaccgttacctttgcctcccatgctgcctgaagataaagaagctgatagcttacgaggaaatatttcagtaaaagcagttaaaaaagaagtagaaaagaaactccgatgtcttcttgctgatttaccgctgccccctgagctaccaggaggagatgatctttcaaagagtccagaggaaaagaaaacagcaacacagttacatagtaaaaggaggcctaaaatatgtgggcctcgctatggtgaaaccaaagaaaaagatattgactggggaaaacgctgcgtggataaatttgatatcatcggaattattggagaaggtacttacggacaagtttacaaagccagggataaagacactggagaaatggtagccttaaaaaaagtacgtctggataatgaaaaggaaggctttccaattacagcaattcgagaaattaaaattctccggcagcttacccatcagagtattatcaatatgaaggaaatagtgactgataaagaagatgctttggatttcaagaaggacaaaggtgcattttatctggtgtttgaatatatggaccatgatctgatgggactactggaatcaggcttggttcattttaatgaaaatcacataaagtcatttatgagacagctcatggagggtctggattattgtcataagaagaactttttgcatagagatattaaatgttccaatatccttctaaataatagagggcagataaaacttgcagactttggacttgctcgattgtatagctcagaagaaagtcggccgtatactaacaaggtaattactttatggtaccgtccacctgaactgctactgggagaagaacgatacacaccagccattgatgtatggagctgtggctgtatccttggcgaactcttcactaaaaaacctatatttcaagcaaatcaggaacttgcacaactagaattaataagacatgaagaaaatgaagtttctgataaacaaatctgactataatgaggcaacggagtataccgaaaagtgtgtggcctttagaatcttacagggttgggttctaatgccagctcagctacttcctgcgcttatggtttagggtcccatatgctcttaagtttttttcttcaaaagtaaaagaggactgataacatgcttagggttgtgagaattaaatgtaaataagttttcagtacatatttcttccctcaccttatttacagtaatgctaggttgtttataggctcaggaatgatgagacctagtgtcagtatagtacagatacatgtaaaactgatcaagagtgataacactaatttgctttaaatggctttacaccatagtgaatgagttattttatttataatttgctttgttccagaaagtattttaggcagattacaaatattttataatagaagtagcatagattaaaaagtgatggagggaggccgggcacggtggctcatacctataatcccagcacttcgggaggccgaggcaggtagatcatctgaggtcagcagtttgagaccagcctggccaacatagtgaaaccccgtctctgctaaaatacaaaacaagccgggcacagtggctcatgcctgtaatcctagcactttgggaggccgaggcggacaggtcatgaggtcatgaggtcaggagatcaagaccatccgggctaacacggtgaaaccccgtctctaccaaaactacaaaaaaaaaaaaaaaaaaaaaa

SEQ ID NO: 1873 - protein, 324 aa, Homo sapien
MLPEDKEADSLRGNISVKAVKKEVEKKLRCLLADLPLPPELPGGDDLSKSPEEKKTATQLHSKRRPKICGPRYGETKEKDIDWGKRCVDKFDIIGIIGEGTYGQVYKARDKDTGEMVALKKVRLDNEKEGFPITAIREIKILRQLTHQSIINMKEIVTDKEDALDFKKDKGAFYLVFEYMDHDLMGLLESGLVHFNENHIKSFMRQLMEGLDYCHKKNFLHRDIKCSNILLNNRGQIKLADFGLARLYSSEESRPYTNKVITLWYRPPELLLGEERYTPAIDVWSCGCILGELFTKKPIFQANQELAQLELIRHEENEVSDKQI

SEQ ID NO: 1874 - DNA, 502 bp, Homo sapien
tttagacagaatttcgctcttgttgcccaggctgaagtgcagtggcccagtctcggctcaccgcaacctctacctcccaggttcaagcgattctgctccctcggccttccgagtagctgggattacaggcgtgcgtcaccacgcgtggctaaatttgtatttttagtagacacagggtttcaccatgttggtcaggctggtctcaaactcctgacctcaagtgatccaccctccttgacctatctcagtgctgggattacaggcgtgagccacacctggctgccttttaactgttctgataagcaaactctacagttaaaaccaatttttgtgtgcactaaaaataccaacttcctcatcaaaatctacaaagtaccatgtgaaatgaaatggcatgaagacaacagtaagaaaactgtagctataactcagaaaaagaatagctgtgatgcatacatagttggaaaatgcataagacaaatctgaagagaagtagaaaata

SEQ ID NO: 1875 - DNA, 1581 bp, Homo sapien
gttggtagaacaccttttcaccttatgtcaaaagcatgaaatatgaaggcctagaaacaaaggttaatttatatacatagtactaataattataccaagtctactattatttcctactagtcagatgatttttatgaatgtaaaatattagaaaggcacagtaagtgacaccaagattaataagacaaataggtatggcagaaacagagaggtatatgagctgcatagggatctctgttgataagaatctgtgtagacttttttctccttccttcctttgatctttgatcatgggaagacatggaaaaagaaagctaactacagtgattttgtccactacactgttatttggttaaaaattttagtttcctaatgagtattagcatgtatgagaaattatgggagaaaaaggcgcatcctagaaaaggtgtgcttaattactattggggattggttaacatagcatgggagctggattgtcagagattcattatctagaaaatggcaacaagagtttataaaacgaacttctgtgagattactttttagctagcaaagacaaagatgtccttcagtaggtgaagtgataaactatgatacatccagatgatggaatactattgaggactaaaaagaaataagctgtcaagccatgaaaacacatggagggacgttaaatgcatattactaagtgaaaaaagctaatctgaaagggctacatactgtgtgattctaactatataacattccataaaaggcaaaactgtgaagacagcaaaaaaaaatcagcggttgccagggtttagaaggaagggagggataaatgtgcagagcacagaggatttttaggccagtgaaaatacttcgtatgatactacaatggtggaaacatgtcattatacatttatccaaacccaaagaatgtccaccaccaagagtgaaccctcaactatggactttgggtgatgatgtgtgggacaggaggtatatgaaaaatctctgtaccttcctcccaattttgctgtgaacttaaaactgctctaaaaaaagtcttttttaaaaaaagctctatgaactagttggtattataaaccttaggccatttcaagtaaaaattacatatcaatgtttattaaatactgagttaatagctgaatacctctttcatatacaaataagtacatttgcaattttttaaaaaagtcttaattccattagtaactgtggtttcatagttgccaaataactgtaagctatggatgttgcacaagactgtgattttatttaatcatttcatatctatttaaacatttccaaagcgcacattcatcttaatgttttcacactatttttgctcaacaaaaagttattttatgttaatggatataagaagtattaataatatttcagtcaaggcaagagaacccgataaagatcattgctagagacgtttaatgttacctgtagcggtacacttgttaaagaagtgattaagcagttacataaaattctgatcatagctttgattgataccatgaaggtataattcagtgcctggatactaacaactttacttgttta

SEQ ID NO: 1876 - protein, 52 aa, Homo sapien
MILQWWKHVIIHLSKPKECPPPRVNPQLWTLGDDVWDRRYMKNLCTFLPILL

SEQ ID NO: 1877 - DNA, 673 bp, Homo sapien
cagaaacagaatgcttagctgggcctccaggcacagggacaggaatgaggaaatacttgtaggccctgtgctccttcagcaaaaccctcagtttcttgttatttttataaatgcaaacatcttattaaagtagatgctaaggcattagaatttcctgctttatttttctaaatgaccatgaggaaacctggaatgtcaaaggtaaagtgcaacacattctgcatttaaaaattaaaatgatcctttttaaaagtagcaaccagatgtgaaaaattggactggagtccaggttatagttgatagctttaactttctccccaacagcaacagcacaattttccctaaaatgtgttatgaataagtaaaatgactacttcacatcctttaactcttcctacagaaatctaagagagaaatgaaacaaaagtttgcacagttctagacacgataaatacatgtgaaatcacacaactcagaaaatgtcccttaaattaattgagccattggtacttgtgaattagaagagacatctatgttctgatccactgttgaaagctgtacaatgttacctatttatttgcagacatcctttggaaacaaataggtagatttgcaacaaataaagagtggagtacagctgctgacattaccttgtatattcatgcctttatgt

SEQ ID NO: 1878 - protein, 43 aa, Homo sapien
RNRMLSWASRHRDRNEEILVGPVLLQQNPQFLVIFINANILLK

SEQ ID NO: 1879 - DNA, 3720 bp, Homo sapien
gctctacagcggaggtggctgtggcggtggcgctggtggctgcggcggcggcggcggcagcggcgctcgagcggttcctgtcagggtcagccggcgggccccctgggtggtccacctgcaaatcgcggagcggcgccccagggatcgatggcgatgaactataacgcgaaggatgaagtggacggtgggcccccgtgtgctccggggggcaccgcgaagactcggagaccggataacacggccttcaaacagcaacggctgccagcttggcagcccatccttacggctggcacggtgctacctattttcttcatcatcggtctcatcttcattcccatcggcattggcatttttgtcacctccaacaacatccgcgagatcgagattgattataccggaacagagccttccagtccctgtaataaatgtttatctccggatgtgacaccttgcttttgtaccattaacttcacactggaaaagtcatttgagggcaacgtgtttatgtattatggactgtctaatttctatcaaaaccatcgtcgttacgtgaaatctcgagatgatagtcaactaaatggagattctagtgctttgcttaatcccagtaaggaatgtgaaccttatcgaagaaatgaagacaaaccaattgctccttgtggagctattgccaacagcatgtttaatgatacattagaattgtttctcattggcaatgattcttatcctatacctatcgctttgaaaaagaaaggtattgcttggtggacagataaaaatgtgaaattcagaaatccccctggaggagacaacctggaagaacgatttaaaggtacaacaaagcctgtgaactggcttaaaccagtttacatgctggattctgacccagataataatggattcataaatgaggattttattgtttggatgcgtactgcagcattacctacttttcgcaagttgtatcgtcttatagaaaggaaaagtgatttacatccaacattaccagctggccgatactctttgaatgtcacatacaattaccctgtacattattttgatggacgaaaacggatgatcttgagcactatttcatggatgggaggaaaaaatccatttttggggattgcttacatcgctgttggatccatctccttccttctgggagttgtactgctagtaattaatcataaatatagaaacagtagtaatacagctgacattaccatttaattttatattatgaaagcaaatcatctgcatgtgcatcaaggccagtcctattcaacctagctttcgaatgctgatatctggttagtatgtcattttgaagttggcacataacttttctaaaaaaaagcagtctttgttgtttgcttcttccctacggatgacttctaaaaatatatgacgggtataaaaaaattagctatattgatcatatcaacactgtaactgctgaaatggcattctaatgtttgctttttattcggacaggccacatgatgcatagagcctctttcatgtgacttgtgtctactgcttaaatctttatgctgtgttgatgatattatattgacatatgaagctgtatatgtgtatgtattttgtggagaaagggattacaagatgtatgagtataatgacttgctaacctttcaggattcagagaaagatgaagaaagaccatatctaaataatacacttcatcattttcatgtgtataaatgcttaaagtaccatctttgttgaggtggttcatgtatccagtttatccagtacagttatttgtcaagcttagctttgatttcaaaggacacgcttaccttgtctggcataagaattaatgctcatgtctgcagtggttgggtaggtcctgcttaggagaattaaaaaattcctctttccgtttggttgaatgttgcagtcaggaaccccaactcacttggaatgtttttatatgtaatcatttcccttgaagcttatactttataagggaagaaagaattcaggtgatatgggaaaactgcttggcagaccttcatcttctgcctcaactgtaaaccacatgtaaatgcttaatggagactgttttcattcttgtgatatttaacattcagaaaattacttcagctttggaaatactcaggctgtttttattctgcaggtaagtgttttgacttaagtactaatattccagaaatttttgaaagcagtaaccttaatttcctatgtatttcattccacttttgcatataggtcaaatagcaatgtgtatgcacattctctttagttaaggcaccaattgttttggttggttttcctaagacatactttaaaaagatgttctataaatttcctagttaaattatggggattttggagtatgtacatgataaattataatacgtatatggttgaagttattttattttttactaatgaattattttaatattccttattgaataaatgctgtaacttgtttgctatggaacttattcttaaagttctagttaaaaataatttttccacatgcatgaaaatatgtattaatcagaggtggcttaattacattgaaattgcttttttgttgttgtttttttactgaaataactcatgtttgtgtagaagaatgcctgtttactcagagtttatattttccttcagttatattttaaatcaaaaggtctgggtaatgtatacttttgattaatatatactttttttaaaaaacaaaaaacaatgtaatggttaatagtagaaatgtgccacacttttcaagttttatataacatatgaaattcagttaaaagaatgtgtgtttcataatgacttttaactggtaaaaatattacttgcacgaagtacttgatgtatggttatcctgaaatttcggagtatttggtgtgttctttgtctaaaaatagtctgttttgtcagtccttcagaatattatttattctgaagattgtccctcttgcacttggcagtttattttcggggatacattgttgggggagaggggtttctgccactctttccagattgagtctgtgctgtttaaggaggactaccatcctgcaactctttttctaattggggcacagaggatgtcgctaaagaaaagttgaagagccctttcagcactttctcatctgtggagaagatggaatcttaaaatacatttggagttttatctgttttacaagtccattgatggcctaagttcctcctgttttctgctgtttgatctctaaggaactcctgttgctaaatatgaagagtatggaacattcatatagtctctgtgaagcatggggggagggaagacatttctttttcttataggctttatgctcaaatgtcatagtctcctttcaaagaattgtgttgcattttaaatgcacccagcttaagtagaagacattgaaggatgcattaattttcaggaactattttgaattatgaaaagattcccaattgaaaaaattattcaacaagtaaaagctaagaaatttcattgaaatcataaggcagtttaagcataaattgataaaaatagctgtgtactactaattaatagaaaatcattcaaccaagagaagagtcaagtgaatatcgtttgtttatttgctagtgagtttctttgtaacgttgattttattaaatgataatatttggttagtatgtcctatgttaataaaaatgaacaaaatt

SEQ ID NO: 1880 - protein, 361 aa, Homo sapien
MAMNYNAKDEVDGGPPCAPGGTAKTRRPDNTAFKQQRLPAWQPILTAGTVLPIFFIIGLIFIPIGIGIFVTSNNIREIEIDYTGTEPSSPCNKCLSPDVTPCFCTINFTLEKSFEGNVFMYYGLSNFYQNHRRYVKSRDDSQLNGDSSALLNPSKECEPYRRNEDKPIAPCGAIANSMFNDTLELFLIGNDSYPIPIALKKKGIAWWTDKNVKFRNPPGGDNLEERFKGTTKPVNWLKPVYMLDSDPDNNGFINEDFIVWMRTAALPTFRKLYRLIERKSDLHPTLPAGRYSLNVTYNYPVHYFDGRKRMILSTISWMGGKNPFLGIAYIAVGSISFLLGVVLLVINHKYRNSSNTADITI

SEQ ID NO: 1881 - DNA, 816 bp, Homo sapien
ccctgtacaatttgatagtcattcgtaatcagcaggccaaagactcagaggagtggcagaagctcaactatgatatccataccctgcggcaggttcgaagggaagtaagaaacagatggaagtgcatcttagaagatttaggttttcaaaaggaagctgactctttgttgtcagtgactaaactcagcaccatcagtgattctaaaaacacaaggaaagctcgagagatgttgttaaaactggctgaagaaaccaatattctcccaacaagttgggagctctcagagagatatctctttgttgtggaccgtctcattgcacttgatgctgcagaagagttctttaagcttgctcgtcgaacttaccccaagaagcctggggttccatgcctggcagatggccagaaagaactgcactaccttccgtttccaagtccctaaaggagaggctcaggggcagaatgggaatccttccatgaggactcagcagtcaaccaaagttggacaattacatgtagaagagagtgagcaaatagagtttgcttagtaaaaaatgatactgaattctacataaatgtaaagtctttaatctgaggaccctgccccatgaattgtgcaggctgcattgaaacgccttggtgatctcatatttaggaagaaagttaaagagttggtcagatggatagttcataatgggtggttccattctgagagcccattgccccagctttggttttagttgtgtcataatctctgatcattaatcctactgactgagtggactatttcagttaataaaacaatatgattaataaaa

SEQ ID NO: 1882 - DNA, 892 bp, Homo sapien
catagggtctatgttacaactactcagctctgctattatagcacaaaagaagccagataatatattaatattaaacaaatgggcatggctatatccaataaagcttcatttacaaaaatagccagcctatggaccacatttgactaagttcaaacagaaataatcctctttaacaagaaataaaacaataccatttaaaggaagataacataagccagatgccttacaaggtattattcacaatgcctaccattcaattaaaaaattactagccatacaaagaggcaggaaaatctgacccataatcaagggaaaaaaaaaaaaaagacccagcatttcttaatagaaattaataatagaactttaaagtagctatttaagtatacccaagaaaataaaggaaaaactagtgaacaaaaaaagaatctcagagaaatggaaattgtaaaataaaaatggaaaatcagtaactgaaatgtacaagatgtgaaatgaaaaattcattgtgtggactactgaatgttggaaaagataggattagtgaacttgaacataaatctatagatgtgtccaatctgaaaaatggagggaaaagatttaaaacatagagcagccactaaagagataatgcaagtatgacttatgaggaaaggaattagatacgtttaacccagaagaagacaggaaaggaagaacattgggggttggggagggacaattagaaaaccaacatatgaaaaagccttccatgtgaaaaattacctgaaagaaaatggactaaaaataacaattgaaaggcagagatgatcagactagtttaaaaatccaaaccacacatacatagtcttttcaacgagtgctggaacaaacaaatcatccatatgccaaaaaa

SEQ ID NO: 1883 - protein, 39 aa, Homo sapien
IGSMLQLLSSAIIAQKKPDNILILNKWAWLYPIKLHLQK

SEQ ID NO: 1884 - DNA, 891 bp, Homo sapien
gtactgataattatagttaactcttcttactaggtaacttgtttttaatactctaaatttcatactatattactcaaaattcagaatgtaagccaaagagagataaagtatattaataaatgttaggtttaaacttgtatgatacatttccaaataggtattatatatttttaaaatatataatgtccatcttttctgtattgatgcctatacaaccataaccccagaagtactctcatactgtgaaagtcattgctaaattaggtattcactttcttaaacacatttctgagaaaagggtgtctttttagggcagatgacttagaagttcttttacgtagccaaggcaaaagattgtctattgaaagcttggaagggctatatgtacatttggaggggaaaaaaaatttatcttacctccagcaagaagagatttctaaaatattgtgctgaaacacaatatacctaggattagacacttttagatagttaaatataagaaatgctaggcaagcataatttgtatatgtataatacaccctgaaaattttattctcaacttcacttctgtttagatctgagacactaaaaatatttcctttagcagaaaattcttcaatgattatagaaagaaaatttgctgtatagtcacaaatttaatatacaaaattaagaagtgccttaaaaaaattgtaacctgataatacttcgcattagtcctcatttcaaatatgtgaagcagccaagatccacaaaagtgtgtattttcatgtattgaatgaatatattaaaatgtttcttttaaattttattttagaaaagatacagtgaaaaccactgaaactgagttagatgaatttgagatttgactttgtttgctttaatatatac

SEQ ID NO: 1885 - protein, 12 aa, Homo sapien
MNLRFDFVCFNI

SEQ ID NO: 1886 - DNA, 3564 bp, Homo sapien
ggcattgatgctgtgtgcgcgtgcgtgtgtgtgtgtgtgtgtgtgtgtgtgtgtgtgtgtgtgtgtgtgtgtgtctggagtcatggcagggtccctttctgtctgtctccttgctctgccccagactggggggctgcagaggtgagggtatctggcctcaacagctgcttattcccgatgggatggcctgggctgggcccctgaggccaggctgacttggacatggcaagaggggtcccaggctcttgtgggcaaagcaggggaggcgccaatgtggaggaacagagtctcctggctggctgctgctctctggagcgggtggagtcagggaagagctgagctggggagtcaccctgggcctggggtcaccgtaggccccatgtagcaccctggttcccctgcctgtaggtgacaggagccagcccagccaggtgtgctccctccccaggccctaggcaggcgggtacaggggccagcagctgcgcccgccccaccttccttcccacccacatgccgaagggtggccaggcaggcaggtggacgagtccaggcagcggctgagtcagtgtgtgtggaatgttctggccgctcccagctgcaccctgcccctacctgccaccacctcaccttcatcctcaggcgctgcggccctgagcccctgccaggaatgcacctttagcccaggcctgctcagtgagctccgccgacagccagccctgctcctcccgccatgaccctgcagacccctctgggcttccaagttcctgggggctgcagtgaacatgctccacctgcatggctggcaaaccatggtgggccccagctgtggtgcgtcctggggtagaggcaaggaagtgatgggaccgcagagatgagacccccagggatgagatgggacccccaggcagggcccagggtccagggcccaggagagagaagcagggagggagagagcttcctggtggaggacgcatcctacagtgggggcaagggtgctctgaggtccggtgaaggcagggactaggctgcccaggccctgcctgcttggctggggctgggggctgctgggaggtggctgggaggctgggcctgggcagctaagctggagctttggccagggtccagagcctccctcccttcagcttcctgctgcacagaaccctcgcccctggccaccccgtgctgcctccttgccctggcagacccagcactggctgctgctagtcagatggggtagcgggcaggggccggaggggccaccctcccagctgacccagcctcctgggccgcttcttccaaaccagcagggtagaaagatggggcacccaccagtctctcccagtgccccggccccagctggcaccacagctatacctgggcttattccagaccttgtcgccgggaccccctgtgagttgtgggattcccaagaggggtgtggggataacccagccaagtgggggctgcagctgtccacagatgcactcagcctggcctctaccccagggccccgctgggctctcattgccggcgcccttgccgcgggcgtcctcctcgtctcctgcctcctctgtgctgcctgctgctgctgccgccgccacaggaagaagcccagggacaaggagtccgtgggtctgggcagtgcccgcggcaccaccaccacccacctggtgaggagcggctccttgctcactcagtccagagagggcttgaaatccaggctccagagcccagggcagcgaggcgagttcagccccagggatggtttaacccccacagaggcagggcgttgaggaccttcctggcagggaaagtgggtgaacagaggtgagaaggaggccatgcaacaggggctgccccatgggcccgagggagccacagcgggttcttgaggaaggcagggggtaccccagatgccacgttttgggtgggtttggccggtctcacagagcgaagccgacgatttgtgcctgttgggtggcctggcctggaggcggggggtcttgacccatgtcatgcaagtgctgcccgggagcccagggctctgatgaggcatgatgtcagcaccacctgccccttgtcccaactcactacaggtgcaacctgatgtggatggcctggagtccagcccgggggatgctcagcaatgggggcgcctgcagctctccctggagttcgactttggaagccaggaggtgaagggccccgctgcgcaggaccagcggttctgcgagtttccggaaagggtgacgggggaagggcagaccccatgccctgggtggtggggagctgacagggcaggggcccttggctgagcccaccccgctggctcccagatcagggtgggcctgaggcaggcagccgacctgaggcctgggggcaccgtggacccctatgcccgggtcagcgtctccacccaggccggacacagacatgagacaaaagtgcaccgaggcacgctctgccccgtgtttgacgagacctgctgcttccacgtgagtcagggatggtcggctgggtgggcctggacggctggatgggcctgggctgggtgggcctgggcagctgggtgggcctgggcagctgggtgggcctgagctagggcagcagggcctggctcacgccgctgcctcagatcccgcaggcggagctgccaggggccaccctgcaggtgcagcttttcaacttcaagcgcttctcggggcatgagcccctgggtgagctccgcctggcactgggcaccgtggatctgcagcatgttctggagcactggtacctgctgggcccgccggctgccactcaggtgaggtgctggtcaccaggccacagcccaaggcagagctggcagggaccctgccctatgggccatcggaaagacaggcctgatgggcagcattttcgggggtctgaaccccaactcggccagaatcaccctcccgggctgaagcccctcttgctgcccacagcccgagcaggtcggggagctgtgcttctctctccggtacgtgcccagctcaggccggctgaccgtggtggtgctggaggctcgaggcctgcgtccaggacttgcagagccctacgtgaaggtccagctcatgctgaaccagaggaagtggaagaagagaaagacagccaccaaaaagggcacggcggccccctacttcaatgaggccttcaccttcctggtgcccttcagccaggtccagaatgtggacctggtgctggctgtctgggaccgcagcctgccgctccgaactgagcccgtaggcaaggtgcacctgggtgcccgggcctcggggcagcccctgcagcactgggcagacatgctggcccaccccggcggcccattgcccagtggcaccccctgcggccagccagggaggtggaccgcatgctggccctgcagccccgccttcgcctgcgcctgcccttgccccactcctgaatgcaccacatgcctctgtctccccgctgagcccaggcacttgcccaggccgccctgcaggaccactgcaataaacgccttctcctgccaaaaaaaaaaaaaaaaaaaaaaaaaaaaag

SEQ ID NO: 1887 - protein, 158 aa, Homo sapien
MGHPPVSPSAPAPAGTTAIPGLIPDLVAGTPCELWDSQEGCGDNPAKWGLQLSTDALSLASTPGPRWALIAGALAAGVLLVSCLLCAACCCCRRHRKKPRDKESVGLGSARGTTTTHLVRSGSLLTQSREGLKSRLQSPGQRGEFSPRDGLTPTEAGR

SEQ ID NO: 1888 - DNA, 290 bp, Homo sapien
ggatcaagcaatcctcctgcctcagctttccaagtcgctgggactataagtgtgtaccacagcatgtcagctctctctctccttcttgacctaaagcctagcataaaattagctaagtagaatgtttccaatgatggctgcatcagtatctcccatcccacataatttctgtttgattttgccattcacccataaaatggtgggatctacctcccctccttgcaaatttgagctggccctctgatcctgtctaagatctgaagccagatactaaggtacttcattaattt

SEQ ID NO: 1889 - DNA, 1114 bp, Homo sapien
ggccacgcagccctgtgggaactgccgcacggccacttttatgaagtggacacgtgttggtcccactgaaaagaaactccccacccatggctccctcacgctgcagcagaggccctgccacagcacctgtcagcccctgccagcttgcaggggcgcaggcgcagagcggtttgtgcccttgctggagccagggaagggcacagggtccctcctggagtcatgggaggtgcagccgaggttctatattaaaatacagaggctagcacatgtgcttggggaatgcagctacagtagtggaatgaaagtgctgtctgttccttacccccccagctcctcacctgtcctccacacgcatatccctggctccctttccctagtaaggagactgaattgaaattgtggcttgcccgaggctgcatacctgtgctctttctgaagcccaagtcactggctctagaattctaacctgtgaggaagccactgaggatgtttgtcaaaatacataatttctgtgccttgccccagttccacggcccaggaatctgcagttttcacaagcacccccaggtgattctggtggtgtctttgcacttcttcaaggcagtactgcctggaacgcagaatcccagcctcctctatcctccttgcctaatggcctggatgctctcagatctacaggggaagggaaggtcacacagtcatcgcaatagtaacctcagctgataaatcctcccccataaaacttattccccagtgttttttaataggaaacaataaaactgtaaccagcccaaatattcatcaaagagaaaatggagaagtaaatcatcgcacattcacctggaccagatctattgtaaagccaataatactgaagccccttccaaggccctgggagtcctaacagtgcactggcagtgtctataatttatattatgaaatttgcataaggaaaacattttgtctcatttgtgcaatttctccttctaaatatacgtgtcactttgtacctgatttctataagacccaggacctacaaaccctgtgtctgcccctgcagccacccagggaaggactgcacagcagcaagacagattgccatggagcatgttgt

SEQ ID NO: 1890 - protein, 130 aa, Homo sapien
ATQPCGNCRTATFMKWTRVGPTEKKLPTHGSLTLQQRPCHSTCQPLPACRGAGAERFVPLLEPGKGTGSLLESWEVQPRFYIKIQRLAHVLGECSYSSGMKVLSVPYPPSSSPVLHTHIPGSLSLVRRLN

SEQ ID NO: 1891 - DNA, 3216 bp, Homo sapien
  Unsure 725-846, 1061-1109, 1613-1712: Unknown base
aaatttctaccagaaagggcaagggagaaacattttgttactgctggcccactctaccctcttgaaacaggcggcaggatctgcagaaagaaagttttacaaggggcttctaagcagcagtgctgccccatgccccccgggcttctcctcccagcaggcagcagcatatggcacctgggataggagtctcagggcggggcggggagctgaacatcctgggggcaccactttatgaggaaccatttatggccagaactctacaggggcttcagggacctgaatgaactcatctctgtagagtgagagtcctgggcaggaggagaggtttccatagcccaggaccacatgctggaaatttggtctctgcagcttaaaatctgagagaagatggtgtctgcagcattcaaagggggaccagagggaccctccacccctggcccccccagctattacaaacatgagccctgggaagattcctatcaaaaacccaagctggggcccatgagtcaagtctggacgtgcagtttggggcaagaggacagatggaccccacaggccgtctgtctaaatatttgcaagttataaattaaactaacagggtgttaaataaagtatattctagcctcagcccctgacaaatattcctttaaaaggataaaattttttagatgtgtatgaagctatgatttgtagataacagaaagttagcaaaatgtcaaagatcnnnnnnnnnnnnnnnnnnnnnnnnnnnnnnnnnnnnnnnnnnnnnnnnnnnnnnnnnnnnnnnnnnnnnnnnnnnnnnnnnnnnnnnnnnnnnnnnnnnnnnnnnnnnnnnnnnnnnnnnnnatggaagcgagtaataaaatacagaaatgtgtaatttataaattactgaaagtattccatgaaatttatttttcttatcttcctttcagcaaaatcaattatgggattattgtcaagatttatgatacatgtaaggattagaacagtcatattcacagtacaaatatcttaatatttgaatcaaaaatatttttatgtaaaagattgaattttgnnnnnnnnnnnnnnnnnnnnnnnnnnnnnnnnnnnnnnnnnnnnnnnnngtgagcctgtatcttaatcaaagtcctgagaataaccttgaagaagactcccttgcaatgaggaacaacagaagaagcaagggacctggaatctggcagacctgggtttgaattctggctctgtcactttctggtgaagtgacttgagtaatgaacatgagcctttctgggtagcgtttacagcacaaagcaatttgaggaataaatgaaagagcacgtgtctagtgcctagcaatgcgctggacacagtgccggtgctcagccatcatgtcacaccagcactgaccggtgagcataaaccctggggatgcccagagctggtacagccaggagctccagaagcgtgggattctcagagggaagtggagctcactgctctacaggtcctcttcaagttagaaagtaagatacaatgcacacaaagccaaattgtcatcattcagctcctattacaggggaactaagagctgcattgaaaattatttgcaaagcttgtaagtggtnnnnnnnnnnnnnnnnnnnnnnnnnnnnnnnnnnnnnnnnnnnnnnnnnnnnnnnnnnnnnnnnnnnnnnnnnnnnnnnnnnnnnnnnnnnnnnnnnnnngcaagagttgttggaaaaatgaaaatgaggtatcataggaggtaacatgtatggagcagtttagccatatggccaaagcacatgtgtctaagaacttcggacatgttatctcacttgtataagtacttaggtgcctacaacataaacagcacctggtaaattaagtattgaaaaaatgctatggggcagaggatgaaatgctaagcttctgtgagaagagaagacagcttgttacacaggtgaaaagaacaagctgcagctgagagaagaaaagtataagagttgctaggtgtgacaatctcaagacttttcaaccactacaaatttaaacagccaccctaaatcaccccaaaggacagactcgagttgttctttttgtctttaatgtttgcgcctctccgaatcagagaagaagctgccaggattccagtacataccaaaacatgatgacaataccctcaactgtgcaaacttttgtgcatctaccgctatgtaaaggaagctgatgtcagtagactggggggaacagtaaggcatgtttgtgaccgaagctcaatttgccatcacagtgtggccacacctacctcactaatattctaatagtgggataaataattcaatagggataaagcctggattttcctcttattctctcttagtgcttacattcttggcatgatatcgatatgccatagacaagccaatatgtgagtgtactctatctgaataaagtatagcctttctacattgcaaagtcatccagtttctaaaattattgttagaaccaatgaagtgactaagagaattttaaaaaataagccatcagtctggacctgtgtataggaatgaaggagaagcactttaaagtcagggaaaaaatataaacatacttaacatttaggattatcaaccattgctgcttttccataaaccatttcattcatgatttcatctgtaagagatatgattattgcccccattcagtgagggactttgatagttagccgcctggtccttcttgcttggatgccctgcaaataaatgtcctcctttccccaatgcaaaacctcgatatggttgtttgactttactgcgcttgggccagcagaatccagttaagtccactaataagctcttggcctgtctttgagatggatttcagattcaaaatagacagaccctatcaccctgctaacttggccagtcagtatttgtcaataacatagaggcttcattcaagagatttactgggttgtaactattggaacccagggatgatttcaggattttgtggggcctgagccttatctagtaaaaacattaaaaaaattatgaatacaaaaatttccaggggccctcccacgaccttggaagggcctgtgcaagtgagaagcctggaaggttaggctctattcatcatcgatcaaccacagctggggcctctttttttgtttgttttttataaacttgtgtaatgcagggaaatatattgtttcaacttccc

SEQ ID NO: 1892 - protein, 77 aa, Homo sapien
  Unsure 725-846, 1061-1109, 1613-1712: Unknown amino acid
NFYQKGQGRNILLLLAHSTLLKQAAGSAERKFYKGLLSSSAAPCPPGFSSQQAAAYGTWDRSLRAGRGAEHPGGTTL

SEQ ID NO: 1893 - DNA, 10763 bp, Homo sapien
  Unsure 7958, 8019, 8080, 8141, 8202, 8263, 8324, 8385, 8446, 8507, 8568,8629, 8690, 8751, 8812, 8873, 8934, 8995, 9056, 9117, 9178, 9239,9300, 9361, 9422, 9483, 9544, 9605, 9666, 9727, 9788, 9849, 9910,9971, 10032, 10093, 10154, 10215, 10276, 10337, 10398, 10459,10520, 10581, 10642, 10703: Unknown base
atgcccatcacccaggacaatgccgtgctgcacctgcccctcctctaccagtggctgcagaacagcctgcaggaaggtggggatgggccggagcagcggctctgccaggcggccatccagaagctgcaggagtacatccagctgaactttgctgtggatgagagtacggtcccacctgatcacagcccccccgaaatggagatctgtactgtgtacctcaccaaggagctgggggacacagagactgtgggcctgagttttgggaacatccctgttttcggggactatggtgaaaagcgcagggggggcaagaagaggaaaacccaccaggggcctgtgctggatgtgggctgcatctgggtgacagagctgaggaagaacagcccagcagggaagagtgggaaggtccgactgcgggatgagatcctctcactgaatgggcagctgatggttggagttgatgtcagtggggccagttacctcgctgagcagtgctggaatggcggctttatctacctgatcatgctgcgtcgctttaagcacaaagcccactccacttataatggcaacagtagcaacagctctgaaccaggagaaacacctaccttggagctgggtgaccgaactgcgaaaaaggggaaacgaaccagaaagtttggggtcatctccaggcctcctgccaacaaggcccctgaagaatccaagggcagcgctggctgtgaggtgtccagtgaccccagcactgagctggagaacggcgctgaccctgaacttggaaacggccatgtctttcagctagaaaatggcccagattctctcaaggaggtggctggaccccatctagagaggtcagaagtggacagagggacagagcatagaattccaaagacagatgctcctctgaccacaagcaatgacaaacgccgcttctcaaaaggtgggaagacggacttccaatcgagtgactgcctggcacggcaggaggaagttggccgaatatggaagatggagctgctcaaagaatcggatgggctgggaattcaggttagtggaggccgaggatcaaagcgctcacctcacgctatcgttgtcactcaagtgaaggaaggaggtgccgctcacagggaataccacattgtgaagaagtctacccgctccttaagcacgactcaggtggaatctccttggaggctcattcggccatccgtcatctcgatcattgggttgtacaaagaaaaaggcaagggccttggctttagtattgctggaggtcgagactgcattcgtggacagatggggatttttgtcaagaccatcttcccaaatggatcagctgcagaggacggaagacttaaagaaggtgatgaaatcctagatgtaaatggaataccaataaagggcttgacatttcaagaagccattcatacctttaagcaaatccggagtggattatttgttttaacggtacgcacaaagttggtgagccccagcctcacaccctgctcgacacccacacacatgagcagatccgcctccccgaacttcaataccagtgggggagcctcggcgggaggttccgatgaaggcagttcttcatccctgggtcggaagacccctgggcccaaggacaggatcgtcatggaagtaacactcaacaaagagccaagagttggattaggcattggtgcctgctgcttggctctggaaaacagtcctcctggcatctacattcacagccttgctccaggatcagtggccaagatggagagcaacctgagccgcggggatcaaatcctggaagtgaactccgtcaacgtccgccatgctgctttaagcaaagtccacgccatcttgagtaaatgccctgtttccgagcaggaaatggatgaagtcatagcacgcagcacttatcaggagagcaaagaggccaattcctctcctggcttaggtactcccttgaagagtccctctcttgcaaaaaaggactcccttatttctgaatctgaactctcccagtactttgcccacgatgtccctggccccttgtcagacttcatggtggccggttctgaggacgaggatcacccgggaagtggctgcagcacgtcggaggagggcagcctgcctcccagcacctccagtgagcctggaaaacccagagccaacagcctcgtgactcttgggagccatcgggcttctgggctcttccacaagcaggtgacagttgccagacaagccagtctccccggaagcccacaggccctccgaaaccctctcctccgccagaggaaggtaggctgctacgatgccaacgatgccagtgatgaggaagagtttgacagagaaggggactgcatttcactcccaggggccctcccgggtcccatcaggcctctgtcagaggatgacccgaggcgtgtctcaatttcctcttccaagggcatggacgtccacaaccaagaggaacgaccccggaaaacactggtgagcaaggccatctcggcacctcttcttggtagctcagtggacttagaggagagtatcccagagggcatggtggatgctgcgtcctatgcagccaacctcacggactctgcagaggcccccaaggggagccctggaagctggtggaagaaggaactgtcaggatcaagtagcgcacccaaattggaatacacagtccgtacagacacccagagtccgacgaacactgggagccccagttccccccagcagaaaagtgaaggcctgggctccaggcacagaccagtggccagggtaagcccccactgcaagagatccgaggctgaggccaagcccagtggctcacagacagtgaacctgactggcagagccaatgatccatgcgatctggactcgagagtccaggccacttctgtcaaagtgactgtcgctggctttcagccaggtggagctgtggagaagttgtgccaggaatctctgggaaagctgaccactggagatgcttgtgtctctaccagctgtgaactagccagtgctctgtcccatctggatgccagccacctcacagagaacctgcccaaagctgcatcagagctggggcaacaacccatgacttcctcagacctcatctcttccccagggaagaagggggccgctcatcctgaccccagcaagacctctgtagacacagggcaagtcagtcggccagagaatcccagccagcctgcatcgcccagggtcaccaagtgcaaggccaggtctccagtcaggctcccccatgagggcagcccctccccgggggagaaagcagcggctccccctgactacagcaagactcgatcagcatcggaaaccagcacaccccacaataccaggagggtggctgccctcaggggagcgggacctggagcagagggaatgacaccagctggtgctgtcctgccaggagaccccctcacatcccaggagcagagacagggagctccaggtaaccacagtaaggctctggaaatgacaggaatccatgcacctgaaagctcccaggagccttccctgctggagggagcagattctgtgtcctcaagggcaccgcaggccagcctctccatgctgccatccactgacaacaccaaagaagcatgtggccatgtctcggggcactgctgcccaggggggagtagagagagccctgtgacggacattgacagcttcatcaaggagctggatgcttctgcagcaaggtctccgtcttcccagacgggggacagtggctctcaggagggcagtgctcagggccacccaccagccggggctggaggtgggagctcctgccgtgccgaaccagtcccggggggccagacctcctccccgaggagggcctgggctgctggtgcccccgcctacccacaatgggcctcccagccttcggttttagattcaattaatcccgacaaacattttactgtgaacaaaaactttctgagcaactactctagaaattttagcagttttcatgaagacagcacctccctatcaggcctgggtgacagcacggagccgtctctgtcatccatgtatggcgatgctgaggattcttcttctgaccctgagtcactcactgaagccccacgagcttctgccagggacggctggtcccctcctcgttcccgtgtgtctttgcacaaggaagatccttcggagtcagaagaggaacagattgagatttgttccacacgtggctgccccaatccaccctcgagtcctgctcatcttcccacccaggctgccatctgtcctgcctcagccaaagttctgtcattaaaatacagcactccgagagagtcggtggccagtccccgtgagaaggccgcctgcttgccaggctcatacacttcaggcccagactcttcccagccatcatcactcttggagatgagctctcaggagcatgaaactcatgcggacataagcacttcacagaaccacaggccctcgtgtgcagaagaaaccacagaagtcaccagcgctagctcagccatggaaaacagtccgctgtctaaagtagccaggcattttcacagtccgcccatcattctcagctcccccaacatggtaaatggcttggaacatgacctgctagatgacgaaaccctgaatcaatacgaaacaagcattaatgcagctgccagtctgtcctccttcagtgtggatgtccctaagaatggagaatctgttttggaaaacctccacatctctgaaagtcaagacctggatgacttgctacagaaaccaaaaatgatcgctaggaggcccatcatggcctggtttaaagaaataaataaacataaccaaggcacacatttgaggagcaaaaccgagaaggaacaacctctaatgcctgccagaagtcccgactccaagattcagatggtgagttcaagccaaaaaaagggcgttactgtgcctcatagccctcctcagccgaaaacaaacctggaaaataaggacctgtctaagaagagtccggcagaaatgcttctgactaatggtcagaaggcaaagtgtggtccgaagctgaagaggctcagcctcaagggcaaggccaaagtcaactctgaggcccctgctgcgaatgctgtgaaggctggggggacggaccacaggaaacccttgatctcaccccagacctcccacaaaacactttctaaggcagtgtcacagcggctccatgtagccgaccacgaggaccctgacagaaacaccacagctgcccccaggtccccccagtgtgtgctggaaagcaagccacctcttgccacctctgggccactgaaaccctcagtgtctgacacgagcatcaggacatttgtctcgcccctgacctctcccaagcctgttcctgagcaaggcatgtggagcaggttccacatggctgtcctctctgaacccgacagaggttgcccaaccacccctaaatctcctaagtgtagagcagagggcagggcgccccgtgctgactccgggccggtgagtccggcagcgtctaggaacggcatgtccgtggcagggaacagacagagtgagccgcgcctggccagccatgtggcagcagacacagcccaacccaggccgactggcgaaaaaggaggcaacataatggccagcgatcgcctcgaaagaacaaaccagctgaaaatcgtggagatttctgctgaagcagtgtcagagactgtatgtggtaacaagccagctgaaagcgacagacggggagggtgcttggcccagggcaactgtcaggagaagagtgaaatcaggctctatcgccaggtcgcagaatcatccacaagtcatccatcctcactcccatctcatgcctcccaggcagagcaggaaatgtcacgatcattcagcatggcaaaactggcgtcctcctcctcctcccttcaaacagccattagaaaggcagagtactcccagggaaaatcaagcctgatgtcagactcccgaggggtgcccagaaacagcattccagggggcccctcgggggaggaccatctctacttcaccccaaggccagcgaccaggacctactccatgccagcccagttctcaagccattttggacgggagggtcaccccccacacagcctgggtcgctctcgggacagccaggtccctgtgacaagcagtgttgtccccgaggcaaaggcatccagaggtggtcttcccagcctggctaatggacagggcatatatagtgtaaagccgctgctggacacatcgaggaatcttccagccacagatgaaggggatatcatttcagtccaggagacgagctgcctagtcacagacaaaatcaaagtcaccagacgacactactgctatgagcagaactggccccatgaatctacctcatttttctctgtgaagcagcggatcaagtcttttgagaacctggccaatgctgaccggcctgtagccaagtccggggcttccccatttttgtcggtgagctccaagcctcccattgggaggcggtcttccggcagcattgtttccgggagcctgggccacccaggtgacgcagcagcaaggttgttgagacgcagcttgagttcctgcagcgaaaaccaaagcgaagccggcaccctcctgccccagatggccaagtctccctcaatcatgacactgaccatctctcggcagaacccaccagagaccagtagcaagggctctgattcggaactaaagaaatcacttggtcctttgggaattcccaccccaacgatgaccctggcttctcctgttaagaggaacaagtcctcggtacgccacacgcagccctcgcccgtgtcccgctccaagctccaggagctgagagccttgagcatgcctgaccttgacaagctctgcagcgaggattactcagcagggccgagcgccgtgctcttcaaaactgagctggagatcacccccaggaggtcacctggccctcctgctggaggcgtttcgtgtcccgagaagggcgggaacagggcctgtccaggaggaagtggccctaaaaccagtgctgctgagacacccagttcagccagtgatacgggtgaagctgcccaggatctgccttttagaagaagctggtcagttaagttggatcaacttctagtctcagcgggggaccagcaaagattacagtctgttttatcgtcagtgggatcgaaatctaccatcctaactctcattcaggaagcgaaagcacaatcagagaatgaagaagatgtttgcttcatagtcttgaatagaaaagaaggctcaggtctgggattcagtgtggcaggagggacagatgtggagccaaaatcaatcacggtccacagggtgttttctcagggggcggcttctcaggaagggactatgaaccgaggggatttccttctgtcagtcaacggcgcctcactggctggcttagcccacgggaatgtcctgaaggttctgcaccaggcacagctgcacaaagatgccctcgtggtcatcaagaaagggatggatcagcccaggccctctgcccggcaggagcctcccacagccaatgggaagggtttgctgtccagaaagaccatccccctggagcctggcattgggagaagtgtggctgtacacgatgctctgtgtgttgaagtgctgaagacctcggctgggctgggactgagtctggatgggggaaaatcatcggtgacgggagatgggcccttggtcattaaaagagtgtacaaaggtggtgcggctgaacaagctggaataatagaagctggagatgaaattcttgctattaatgggaaacctctggttgggctcatgcactttgatgcctggaatattatgaagtctgtcccagaaggacctgtgcagttattaattagaaagcataggaattcttcatgaattttaacaagaatcattttctcagttctctntctttctttagcaaatcagagtgacttctttaaaccacaggttgttgaaatggccaacacntggtacagacacggactataaaaatctccaagcttgtgcttacacatgaagcctgacttanactgtatgtgcaacagcaatgaaattaactccagaagccttccacctgcgtcacccaggcncgggagggttccttcgttccagtgcctgtcccctacctttatgttatgtttactgatgggngatacaagatgtgacacacccttctttatttgaaacaaacaaacatttagctagacctttngcttccttcttgccagctctcccaacatacccaatcctggtgatcagggaactaaaagtcntgagggggacacaaatgtcacacctaagaggacaatcaatcattttgtatgattttgtaangtaagtaaatgacagaatgcttttaggcacattcaatggaaggaggagatgtaggtctgtnatatgttaccctgaaaagagaataagacttacttaaaaaaatgaattatgacctgttaggnctgagctcaggaattgtccaaaaaggaaaaagcaaaataattaattgagagtattttttangtgagtgtaatgtataatgtacgtatgcaaagttcaactcaataggttattgatcaccatngaagtattgatcattttctatctcaaaagtgtaagccataaggctgttttacagaatagcnacttctgataagctgtattaaatagccatgagcttcactgcttagagggagcagaaaggtncaacatctaaaagcaccttacaactagtttttgaacctgtcttgataagtgcttgaattcnaagactggtcagtacaagagcagacaaaaatatcacaagtcagtcactgggtttccatttnctgaattttatgcactccaaccatgaatttaaactaaatttttagaaatcaagtatctttnctaagtgtccttggatttatagacaatgtatgtacaatccaaatagaggagcttaatgganatccttttaggagactggttggtttttttccctctttcccaacatgtttaagaaatgtaancattctaagtattggatctcttttcttgacctagtataatgacaactgcagtgacttaagntttttgctgttttcgttttcccgctttgcaatttcctccttttgccaaaaatgttttcctnacagaagactgtcgtgactcacgctacttgggaaactcactctggccactcctcctctggntggcatgagctgcttcccagtagctattccgattggatattccgttcgtcgtcacatagcntggcttttctctcctcatgatgtaccttattttcttaggtaaataattccaaactctcatncgggtcataaagaggaggagaaacagggtgagtcaaggtaaaggagcagaaatgtagttancaagccaggtcgtcttcagtggcacaaaccaacccgttgagccctgacaacatgagtggangagtgcatttgccatacctgtgtgcatgacactaagattttatgttggagatacttctttnaaataacctacagcttgggtctatggctgtgacccccagattcatggaggggctttagccnatcagctttgtacatcatcatttttctgaatgaccaatcccactaaacatctttgaagtcnggcctagagaggtccttcagatgagagagaaatagctggcttgtctgagtccagatttctncatcaactggcaatacaaaggaaaatatggtacaggagttagttagaaaggtcttattganttttacttctacttttcactacagttacaggtagaatactgtaggaagtcagtgcaaggtngcatgcttgattgatagatattgattgtttttcagtctctggggtcagttttgtggtttcntgctttcttgcctaaatcaaagactatttcaagtcaacaacactgaaaactgcttttcgcnctccactcttacagctgtgcctaataataattaattaataaacgcacagccctatgtgaancagacaggaatttcttgtgcaatgtggagcaaatggaatggtctccttccgcaagtctttnttaatcctcatatctggagtacaagggtagacctctggcttaccacatacactatgctaanagtcatcagccactgctactacatcttgccagaaggtttccctcgccaacaaacagttganaatttaagggaagaagcaaaagctaaactgtctttgaccctaagatagatagaaagctatnttatttgtcttcagtgttcaaggcatgactagtatttctaattagcctaataaattcccancactttctgaagtgaacactaatggtattgtcctactaaaactgtcattgtttcttttttntttaactggtcagtcattcacaataagctatgagggtaaataaatatgtgttataacaagntaaaccgtagttgcaagaatataccatgaagattaaagtaggctgggtttcatttccatcnttcccacacatctcattgaatttgatggttgacttaattggcaccataactttgtatgatnattatacattaacctttatttatgtaaagtaaaatgccttatatattaaagagtaagtgcnaataatatgaaatagcctgtacattttaaaaatgttgtcaccaagttatataaatccacantctctgtaaacaaccttttttaagtaattttaaaaaaaataaacactctgcttactactt

SEQ ID NO: 1894 - protein, 2641 aa, Homo sapien [sequence omitted]

SEQ ID NO: 1895 - DNA, 1396 bp, Homo sapien
ccccagatacagtgtttgctactcaactactattgcagaaagttattgagtaattagtgccatcttccttaacctgtacatggagagcattagtctttgcagctgaagagactaaccagtagagaagattcctctcattgtcttgatgagggactgacagcttgctagcgaaaatgttgcttgaccacaggaatgagacttccatgcaccctcatcttgccattattaaagctatccagcatttgggtccagccttaagagaaggtgagagtcatgactaggccagtgaatataacagtgcatataaaagggacctagttaccagggagaaaacagaagtagaccactgaaagaggcaaaacctagtgaaaatagaattattgaacaaaatattgaacaaatacacttgaacaaaataataagggcacataagcagattgaattataacaaattctttagagctagaaaaaaatgacattaagttttaatgtttagattatttaaaaaagaggacacgtgctattaagttccaaattacaggcctagaaaatcagggggaagaattatgtcattaaatggaatgaaagtactaacagataaaatcaagagaagacgattagagacttacaagaagttctgaaggggaaaataaaaaaccaggtggacaagcaataactaaataatagatgggatgaagaaagacttgagactgcagatcagaacagctggctgttgtctagccaggagagaagtgagggaaacacacaaacacctatgcagagtctggcaaaatccctgaattccaaggaaaaagtaaaaatcctctaagcttccatatgaaagaccaagttgcatacaaagaaaaagaaccaaaccgacaccaggcaatcttccttaccacacaagcagaagtagaaaaaagtggaatgacgctacacagttgacaaagaactgcaactcaggaaccttgtactcagccaaaggaccctccacatgtcagaatgaaaaggagatactagtttatcctatctgaggaaaactaaagaaacaacctgtgaatcaaaatagagacctttatacaggggaagataaagaagacagagaacagtttaataaagaaaacagtagatcagtctcactaatataaattcaaaagtaaaaataaaatattagcaaattgaatctgccattgtatcaaaagaattctagactatcaacactagagtttatttcagacatgtaatgatgatttgttaccaggaaatctgtcaacataatttattctatcaaagggacaaataatcatagaagctattctcatgagaatttgaagtaaaatgggtataagaaggcatttatgcctgtaatcccagcactttgggagggcgaggcagt

SEQ ID NO: 1896 - protein, 12 aa, Homo sapien
MPVIPALWEGEA

SEQ ID NO: 1897 - DNA, 464 bp, Homo sapien
gaaaatgctgaatacaaattatggagaggttaaacaaggaaaaacattgcaaaacaatgaaaaagaatatgtctttttttgcatactagcaaacgggaattcacctttcacttcaacatcacttttaaaaatttcagcgtatagcaagaacagacagtggaataggattcaatttcagctattttgggaataagaaaattttccataaatgcagcattgaactcatccattagcatatgctggtgcttttctgttgacattagtcaaataatttagaagcacaaagaatattattacacatttaggaatgaagtgtatatccaatttaaggtctagatattaaaggaatcacaatctgtgttattaggcctgcatttttcctttctttttgtctcttcagacatgttaaaatttctacttatcattttgtcaactctgtgtgtttgcattcgttcttggaaatt

SEQ ID NO: 1898 - protein, 63 aa, Homo sapien
KMLNTNYGEVKQGKTLQNNEKEYVFFCILANGNSPFTSTSLLKISAYSKNRQWNRIQFQLFWE

SEQ ID NO: 1899 - DNA, 901 bp, Homo sapien
  Unsure 610-649: Unknown base
ccttcctttcgttccttccagagaatttgtgttctctgtacctgagatcaaatgtgtgtctaagcaattctggcccctggctcccaccaccctaccctctccacaaaataatagacattaggggaggtaagggaacagaagaggtctctttgcagatattatatttttaaaaaatggttctatgtaataagcagcagctaaggagacagaaagacagtagatgaagagagtgccaatatcttccatggggaaaaatgaatgaactgaaagagaatattatttttctagaatacagaaagctgtcctctcacagatcagctggaattccaaggtggattatggacttcttctaactcccattgatagtgcttcttaccaggtgaagggaagggctactttttcctaaaggagaaaaaagctttcagacaaagctcgtaccaacccctgaactgcaaatttgctcaagtgaccgtgcatacttatattcctaatttaaatgattatttatgtcaaacgctcattgtgaaacttgaaaatgttgtattacattacatcaaataaagtttacttgtagcagacagaaagagagaaagagaaagaaaggaaagannnnnnnnnnnnnnnnnnnnnnnnnnnnnnnnnnnnnnnnggaaataaagaaattaaagggctgggcttacaggagcctggagggttgggagatctacaggggttttaccaccggggaacttgaggctgagggtccagtcactgtgggcagtgacaggtgtggatgtggtgtcttctgggaaggggcctgctgacaacaagcttcctccagccctggctggacatagagggaaacaaagtcaccgatcctcagtccaccagaaggcagttttgaccttgaagaagagggcta

SEQ ID NO: 1900 - protein, 55 aa, Homo sapien [sequence omitted]

SEQ ID NO: 1901 - DNA, 548 bp, Homo sapien
caaacattcagatcataacaaatgtgaaaatgaattaatctttaggaaaattggtggcactttttgtgtatcctagtaagaagtttggttactgggtaataagtctgttgaaaagattataatttaacaaaatgtgaaaattatggtaatatttatgaagatttttttaaagcagcatatcagattctttctcacattttatattggtgtggttggtgtttttcttatggggagaaatactagtaagtgaactatatagacatttaaaattaacatgagttaaatccattataaattttagaaaaccatttattctacagtagtttccaaaactggggtatacctatcccaagctatacactaagatttttcaggatatataaaggcacagagagctttaagggaatctgtttctagtcttcggagatcttgtttatgttttttgcattgtcttttccaaagtctcttacttgttaccttttgctgttatgtatttcccattatgcattgatccaagatgtaaaaacctctagggcaccgaaacagga

SEQ ID NO: 1902 - protein, 36 aa, Homo sapien [sequence omitted]

SEQ ID NO: 1903 - DNA, 639 bp, Homo sapien
taaataaagggtagctaagtgctaacaggtagatgagaagatagacaaactcactagtaatcagaaaaaaatgaaagtaaatgagatacaatttttcacccatcaaaatgacaaatatttaaaagttttctgatgccaagtattgggtatggtgtagatatctgtgtacttacgatgtgagtgtaaactaatattgtcattctgtaaaccagtcaataattaaatcagaagtgtttaatccctctgacccagcactcagaggaatttttaaacagatctttgaggatataatctttgtagctgcatagtttgtagtagtggggatttggagatagcctagctaaatatccatcactggtaaatagagcaaataagaaaaatgaaatgggagtaacaatggtgagatctttaaaactagatgaaactttaaaacatacagttgagagaaagaaacaatgagattcataaatatttaagaaaatagaaaaagcacagtagaaggaaatcggagtagagataataggaggaaagaggaaacaagtttgaggaaatatcacttgctaaatttatttatattatatttctatagatgaagcaaggatgatacagattcttttttctggatgaagcctggcttga

SEQ ID NO: 1904 - protein, 5 aa, Homo sapien
MKPGL

SEQ ID NO: 1905 - DNA, 945 bp, Homo sapien
catgtcatccctgtacccatctctagaggacctaaaagtggaccaagccattcaggcccaggtcagagcctcacccaagatgccagccctgccagtccaggcaacagccatttccccaccaccagttttgtacccaaacttggcagaactggaaaattatatgggtctttccctctccagccaagaagtccaggagagcctgcttcatattccagagggtgacagtacagcggtctcgggccccgggcccggccagatggtggcaccggtaaccgggtacagcctgggcgtgcggcgagctgagatcaagcccggggtgcgcgagatccacctgtgcaaggacgagcgcggcaagaccgggctgaggctgcggaaggtcgaccaggggctctttgtgcagttggtccaggccaacacccctgcatcccttgtggggctgcgctttggggaccagctcctgcagattgacgggcgtgactgtgctgggtggagctcgcacaaagcccatcaggtggtgaagaaggcatcaggcgataagattgtcatggtggttcgggacaggccgttccagcggactgtcaccatgcacaaggacagcatgggccacgtcggcttcgtgatcaagaaggggaagattgtctctctggtcaaagggagttctgcggcccgcaacgggctcctcaccaaccactacgtgtgtgaggtggacgggcagaatgttatcgggctgaaggacaaaaagatcatggagattctggccacggctgggaacgttgtcaccctgaccatcatccccagtgtgatctacgagcacatggtcaaaaagttgcctccagtcctgctccaccacaccatggaccactccatcccagatgcctgaagccactgcagggcagggcaggcagggggggcttcccgccctcctgcagcaaagggcaaccaccc

SEQ ID NO: 1906 - protein, 292 aa, Homo sapien
MSSLYPSLEDLKVDQAIQAQVRASPKMPALPVQATAISPPPVLYPNLAELENYMGLSLSSQEVQESLLHIPEGDSTAVSGPGPGQMVAPVTGYSLGVRRAEIKPGVREIHLCKDERGKTGLRLRKVDQGLFVQLVQANTPASLVGLRFGDQLLQIDGRDCAGWSSHKAHQVVKKASGDKIVMVVRDRPFQRTVTMHKDSMGHVGFVIKKGKIVSLVKGSSAARNGLLTNHYVCEVDGQNVIGLKDKKIMEILATAGNVVTLTIIPSVIYEHMVKKLPPVLLHHTMDHSIPDA

SEQ ID NO: 1907 - DNA, 469 bp, Homo sapien
  Unsure 137-215: Unknown base
ggctggatcatatgatagatacatgtttaactactttaaaaatataagtatagttttgtaaccctgtatcttcagttaatatgaaaatattttcaagtcaataaatacattcctataaaattattttttaactgttnnnnnnnnnnnnnnnnnnnnnnnnnnnnnnnnnnnnnnnnnnnnnnnnnnnnnnnnnnnnnnnnnnnnnnnnnnnnnnntttcactattataaacagcattaccatgaatatccttgaaactaaatctttgaacatgttcttaattatttctttaagataaattactagaaatgagattgcctggccaaagttttattacagatttccctccagacatatgacagattaaatcatcaatcagatttttttatttgagtactagatttagatacagttagccaaaataccccttttttccagactggggcaacatggcgaatcccacatctaca

SEQ ID NO: 1908 - protein, 6 aa, Homo sapien
  Unsure 137-215: Unknown amino acid
MANPTS

SEQ ID NO: 1909 - DNA, 8622 bp, Homo sapien
cttgaacccaggaggcagaggttgcagtgagctgagatcgcgccactgtacttcagcctgggtgtcagagcaatactccgttttggaaaacaaacaaacaaacaaacaaacaaaaaacagatggagcaactgagagaggtcttgtgacttgcccaaagtcacacacctcatcactaatcacacctaatcattgagatttggacacacatggttcagttccagagtccatgctccaaaccatgacgacacagtgagagaacattcaaggggagcccagacccagcttcataaccaggcctgtgagcaggagaaagtggaagggatcgtaagtgcccaggggaggcaaagatggactctgcctgaggatctcagagatttcctggaggagggagaattgaggttgggtgttgaaggatgagtgggagttcaccaggaaaagaaggatatggagaaagacattcactcattcaatgaacatctcctgaggacttctgcaagccctgttccgcctggaacggggtgatgctgggacacagagatgagtcagacctgggcccagccctccagaagctgtccacctggtgagaaggaatgatgaggagagaggcagggaggatggggtgatggaagggacaatggggtggggggcagggagatggatgaaaaaaatatatagcaaatgttctcaggatttggcaaagatcaggatgtattaagagagagcacagggcacttgctacctggaaggttgggcacctgggtccttgggtggtggagccgtggggaagggggcaggttatgacaagagtgggttaatccagatggaaccagatttctcaacattctaggagagggccttgtccttgtgggaagaggcccaaatccccagggcagggaaggttctgcaaggtgtgtaaacctgtgcagctgcctgtggtctctgcctcactccacctggatttccctcaatctttcccgtgttctgtctcctcctcccactcctcctctcatcttgggtccttctgtgcctgtacctccctctctttgtatcttttgctcttgtgtctgagtcctgactctgtcttccacccctcgcctcctttctgggtggtccccctgcacatccctccagcctgccgtgggaggttggtctctgcacaccactgctttatccaaaataaacctgctgcaccccaggaccttaggcttcaaggatctccctccttttccaggacacaaaagattctgtatcttgtagcctaaggtgatgaggaatgaggtctcccactctgaagaccccagaggaggtgcccacaacctctccacacccccagcactcctcctccattcagtcaagctctggcccagcaagccgccagttcatcccaaaaggggggtccccctgcacttacctcctctcccaaggcccctgtcacagccccagggcttccccctcccccaggtacatttcccaaccccgattaatcacaggggcggccccatggaggaggaaggagatggcatggcttaccataaagaagcactggacgccgggtgcacgttccaggatccaggtgcccaggggtcatgaagctgggactcctctgtgctctgctctctctgctggcaggtgaggctcccaggctggctgccccttcacggctgtactaaggtcaccttgctcttccctcccatcccaggcttctgcctcctgccctctaggcttctcagcatcctctccctgccctcccagcctgctcttcgctgacccctttgtccctcatccccaccccagggcatggctgggcagacacccgtgccatcggggccgaggaatgtcgccccaactcccagccttggcaggccggcctcttccaccttactcggctcttctgtggggcgaccctcatcagtgaccgctggctgctcacagctgcccactgccgcaagccgtgagtgacccaggctggccatgctggggagggacagaggctgggggtcaggagagggtgaggggtgctttaggccagaagtgcggagcctccacttctgataccacaagttcaactcttagaagtaggaagggtagcctcccaaatcctaaaattctagagaccagcaatatctcatttgagaagtctaagattcgaaacttaggctcttcgaatccgagactgacccagagaaatccagaatcgtagaatcctaaaatcttgaatttatgaaattctgcaatagcctcagcaaattttagaatcatagattcgcagactattagaatcttagcagtctgggtcagcactgcccagaggaattatgatgccagccacatgtgtaagtttaaatttctggtggacacatttaaaaaataaggaatgagtaaaattaattctaatagatttaacttgacatacccaaaaacttattttgacatgtaatcaatttttaaatacgtatgaacgatacagtttacttttgttttggtactaagcctttgaaatctgttctgtattttacacacatagcctgttacaaaatggactagccacatttcaagtgttcaatagccataatggctagtgtgatcctagaatcttaaattcagagctttctagattcattgaatattgaaactcacagtactagaatctttgattcacagtatcctagaatattgagattcagataattctgtagtcttaaactatttgaatcccagactcttaaatttctaaggttatagatttatagaatgatgacattctagtctttcttttttttttttttttttttttttgagacagagtctccctctatctcccaggctggagtgcagtggcacaatctcagctcactgcaacctctgcctctcgggttcaagcaattctcctgcctcagcctcctgagtagctgggattacaggtatgcaccaccatgccaggctattttttttttttttttttttttagtagagacgggggtttcaccatattggccaggctggtcttgaactcctgaccttgtgatctgcccgcctcggcctcccaaagtgctgggattacaggcgtgagccaccgcgcccagccaaaattctagtctttttgtcctagaacattaaaattctatgttcaaatcttagatttaattcagataatgttagaatcctggagtttttttgatccaggggaatctggaatgttagaatcttggattcataaaactctaaaccttgagcctctagattctagaatcatggataatagtgtgtcggaatctgagaattctagaatcttaggttctgggcattctaatagtatcctggaatccacctgatgcaggaatcctctctccattgcctctgaaaagtgaccatccatactgttccaattttcttccctccatgagtaaagcactgattgtggtaagagatgctgtgtgggaatttcccatcatgcattgctccatgatggaacctcctttaacttaagcctatacatcagactgggagaacgatgttcagatttcagccgaaagtgaagcaggagaaatgcagagatatgaaggtggaagagagtgagaggcaggggaagggtagggggatgaagggatgtaggggtgaggactacttttccagatccagagccaagacagcaagaatgacagagagagacagacacagatgtttctggttccccaaccctgaattcgcagtcattagcctgctgcctaatgtcagaggtcagaggctggggaatggacttgtcatccccgaaaggatcccagctgtctagggcatggaccagaaatgaaacaagtgcgctgagactgtggtgagggcttaaggttagacaccaggaagacatgcattgaagggtgaaggatatgatagacaggaaaagctgaggccagagatgacccccaatttggggattttccatatcccatcccctttcatacacacgcacacgtatacacacacaccacttagacatacagagccgctcccacagaagccaccagacctgtgggggcaggggtggggcggttgttatgtggtaggtggggtcccccgtgcccacaccgttcctagggacccaagtcaccaccaaggctccaggtgagtagggaggaaggtggctcactcagcctgggactaggagcgggggctttgtggggagagctacaaagatggagacacacaaaacatcagagtggggaccagggacccagaggaggtgtgtgcctcgcttaaaatcacagtaccctgggccagacatagatgatgagggtgcagagagggtgtgtggcttgcagagggtcacacagcaccctgatggacaggaaaagagggctggggctgaaaggacttttacctttcccccagcttgacctctgaggcctgtcccagcaggtatctgtgggtccgccttggagagcaccacctctggaaatgggagggtccggagcagctgttccgggttacggacttcttcccccaccctggcttcaacaaggacctcagcgccaatgaccacaatgatgacatcatgctgatccgcctgcccaggcaggcacgtctgagtcctgctgtgcagcccctcaacctcagccagacctgtgtctccccaggcatgcagtgtctcatctcaggctggggggccgtgtccagccccaagggtatgacctggcccagaactctctctgaaacttgctccctcacccctctgtctctgccttttcatctctgtcttctccttttctctctcctctctctctctgtcagtctatctatctgccaatcgatatatttaaccaaatataagatgctagcatttttaagatgtgccattatttcatgaactgcgaagaagtggaagaaggaggaggaggagaagaaaaaaaggaggaggaggaaagatcccattagatcccattgattatataacaccattttctggaagacacattctaatttcagagtgtttgtttgtttgtttgtttgtttgtttttgagacagggtctcgctttgttgctcaggctggagtgcagcggtgtgatcacggctcattgcagctttgaactcctgggctcaagtgatcctctcgcctcaacctcccaagtagctgggattacagatatgcaccaccacatcccacaccggggtcatttttttattatttattattattattattattatctttttttttgtatttttagtagagacagaggtttcaccatattggccaggctggtctcaaattcctgacctggtgatctgcccgccttggactcccaaagtgctgggaaaacaggcatgagccactgcacccagccaaaattctagtcttttttaaatctagtcatatcttagatttaattcagataatgttagaatcctggagttttttgatccaggggaatctggaatgttagaatcttggattcataaaactctaaacgttgagcctctagattctagaatcatggatactagtgtgtcagaatctgagaattctagaatcttagattctgggcattctaatagtatcctggaatccacctgatgcaggaatcctctctccattgcctctgaaaagtgaccatccatactgttccaattttcttccctccatgaataaagcactgattctggtaaaagatgctgggtgggaatttcccatcatgcattgctccatgatgggacctcctttaacttaagccttatgctaaaaatttttattatttttagcaaagatgaggtcttgctatgttgtccaggctagtctcaaactcctggcctcccaaagtgctgagattacaagtgtgagccactgtacctggcccagagatgtttaaatgtgaaatgcgttcatcttagaatgggaataagaccatgtctctcagagtcacggatcactgacccattagccaaattgggtcagtggattggaaaaacagtctgaatttgttgctgccaatatctaaaacttggaaagttttatacaaaagccaggtttctggattcacctgaaaaagtttgaagaactcacattcccaaaatagcaagcattgggctgagtcaatggaggctgcccccttcagccaagataagttctctgattcactccaatggacccaaatggctcctgtctccctgcacagcccccgtccccgacttctgtttaccaattctgtttatcatatcccttgatgcatcggagcctgcacccatgtcttatatagatgcacatgtgtattatatatccatatccacatctatactgactacactgtatctggtatctctgtctatgtctctgtctccatcagtgaccatcttcctgcaaatctctttccttttatctcactgccttcattccaccccttgaggtctgggtctttttctatttcttttttttttttttttaagagactgagtcttgctcttgttgcccaggctggagtgcagtggtgtgatctcggctcactgcaacctccacctcctgggttttaagtgatcctcctgcctcagcctcccgagtagctgggactacaggtgtgcaacagcatgcccagctgattttttgtattttcagtagagacggagtttcaccatgttggccaggatggtctcaatctcttgaccttgtgatccgcccgcctcagcctcccaaagtgctagggagttatatatgcatctcctcttatctcttggctctctgcatgcatctttctgtttctcttccttcctttcttttttttttttttttttttttttttttttttttttttgagacggagtcttgctctgtctcccaggctggagtgcagtgaccagtctcggctcactgcaacctccacctcccaggttcaagtgattctcgtgcctcagcctcccgagtagctgggattacaggcgcctgccaccatgcctggctaatttttgtatatttagcagagatggggtttcaccatgttggctgggctggtctcaaactcctgacctcaagcgatccgccggcctcggcctccaaaacactgggattacaggcatgagccacggtgcccggccagcctctctctctacttggccctcttcctccttgtctccatttgtttctcttgtgtgctatgactgtctgtctgtcactgtctcttgtctctatctttgagagtcctaaatgtggctccattggtcctttggaaaagctgcagggaggactcagggcagtggggtgctgagtgtgttggagacagttgcagatccttgacagttctcttccctgacagcgctgtttccagtcacactgcagtgtgccaacatcagcatcctggagaacaaactctgtcactgggcataccctggacacatctcggacagcatgctctgtgcgggcctgtgggaggggggccgaggttcctgccaggtgagaccttactctggggaaaatgaggctgtcctgccaagttttctaggatttaggggagcagaggggtcggcccccagccttcctgggtcaaaatgagaaggagactgggatacctggttcctgggagaggacgggaccagggcctggactccttagtgtaaaagagaaaaggtctggaggtccagacttctggatctacaggaggagtgggctgggcgtccagagtctgagtcctcggggaggaggaggttaggtcctgcggggaggtgggccctctgagcttttactcctgggtctgaggaagaagaggctggagatggaggactctcggatgttggaggaggaaggggctggggcctttctgggagggaggaagtggcccgtgtaattgtcatgaacagagtggcctaacagttcctctgcccttctctcgcgtacagggtgactctgggggccccctggtttgcaatggaaccttggcaggcgtggtgtctgggggtgctgagccctgctccagaccccggcgccccgcagtctacaccagcgtatgccactaccttgactggatccaagaaatcatggagaactgagcccgcgcgccacgggggcaccttggaagaccaagagaggccgaagggcacggggtagggggttctcgtagggtcccagcctcaatggttcccgccctggacctccagctgccctgactcccctctggacactaagactccgcccctgaggctccgccccctcacgaggtcaagcaagacacagtcgcgccccctcggaacggagcagggacacgcccttcagagcccgtctctatgacgtcaccgacagccatcacctccttcttggaacagcacagcctgtggctccgccccaaggaaccacttacacaaaatagctccgcccctcggaactttgcccagtgggacttcccctcgggactccaccccttgtggccccgcctccttcaccagagatctcgcccctcgtgatgtcaggggcgcagtagctccgcccacgtggagctcgggcggtgtagagctcagccccttgtggccccgtcctgggcgtgtgctgggtttgaatcctggcggagacctggggggaaattgagggagggtctggatacctttagagccaatgcaacggatgatttttcagtaaacgcgggaaacctca

SEQ ID NO: 1910 - protein, 250 aa, Homo sapien
MKLGLLCALLSLLAGHGWADTRAIGAEECRPNSQPWQAGLFHLTRLFCGATLISDRWLLTAAHCRKPYLWVRLGEHHLWKWEGPEQLFRVTDFFPHPGFNKDLSANDHNDDIMLIRLPRQARLSPAVQPLNLSQTCVSPGMQCLISGWGAVSSPKALFPVTLQCANISILENKLCHWAYPGHISDSMLCAGLWEGGRGSCQGDSGGPLVCNGTLAGVVSGGAEPCSRPRRPAVYTSVCHYLDWIQEIMEN

SEQ ID NO: 1911 - DNA, 1796 bp, Homo sapien
tgcagccgcgctcacctccgcggtccgccccggcgccccgggacccgttagtgcccagcctgcgggccgaccgcgaccaccgcccggcgcgagcctgcccccagctctgccgacacttgacccagaccagtcccaacgcccagtgcggccgcccggggagccgcgggagaggcggcggcggggggaggagggagaggagggccgagccggcggcacgggaggcccggttttgaagccgcttctctgcccgagttaggtttcgcccagcgcaatttctttctctatgtactttgcgaataagtttcggagcatcggttaacagcctatgggtgaaatttggctttcattcatgaatgagaaattattcttgacagaagtattttaaaagaaaaatctttacgatggcctcagcagtacttagttctgttcccaccaccgcttctcgttttgccctgttacaagtggatagtggcagtggctctgattctgaacctggaaaaggtaaaggtcgaaatactggaaagtctcaaactttaggaagcaagtcaactacaaatgagaaaaaaagagagaaaagaagaaaaaagaaggaacagcaacagagtgaagcaaatgagctcaggaatcttgcttttaagaaaattccccagaaatcctcccatgctgtttgtaacgctcaacatgatcttccattgtcaaacccagtacagaaggattcacgagaagaaaattggcaagagtggagacaaagagatgagcagctgacatctgaaatgtttgaagcagatcttgagaaggcattgttactaagtaaactagaatatgaagagcacaaaaaggagtatgaagatgctgaaaatacttcaactcagtccaaagttatgaataaaaaagataaaagaaagaatcatcagggaaaagacagacctctcacagtatcactaaaagattttcattcggaagatcacattagtaaaaagactgaggaattgagttcttctcagactttatcacatgatggaggattcttcaatagactggaagatgatgttcataaaattcttattagagaaaaacgaagagaacagcttacagaatataatggaacagataattgtacagctcatgaacacaaccaggaagtggttctgaaagatggaagaattgaaagactaaagttagagcttgaaaggaaagatgctgaaatccagaagctgaaaaatgtaatcactcaatgggaggcaaagtataaggaagtaaaggcaagaaatgcacaattattgaaaatgcttcaggaaggtgaaatgaaagataaggcagaaatacttctgcaagttgatgaatcacaaagtatcaagaatgagctcactattcaggtgacttcacttcatgctgcattagaacaagaaagatctaaagtgaaagtattacaagcagagttagccaaataccagggtggcagaaaagggaaaagaaactctgaatccgaccagtgtaggtgattacattagcctttgaagtcaacacaaagtttaaaacttccaggattttgcaaagttgtatatatttaatgctgtgcaactgctaaactatgcagtttttcttgaaggaactaaaagcaactagctccctaatggtctataattttatttcttttggcttaaagtgaaaaagaagaaatagagaattccagcagaattcagtggttgtctactatccatacttcttatcactttagtttttcatcagtcaataaaattaatttactcttccactaaaaaaaaaaaaaaaaaaaa

SEQ ID NO: 1912 - protein, 366 aa, Homo sapien
MASAVLSSVPTTASRFALLQVDSGSGSDSEPGKGKGRNTGKSQTLGSKSTTNEKKREKRRKKKEQQQSEANELRNLAFKKIPQKSSHAVCNAQHDLPLSNPVQKDSREENWQEWRQRDEQLTSEMFEADLEKALLLSKLEYEEHKKEYEDAENTSTQSKVMNKKDKRKNHQGKDRPLTVSLKDFHSEDHISKKTEELSSSQTLSHDGGFFNRLEDDVHKILIREKRREQLTEYNGTDNCTAHEHNQEVVLKDGRIERLKLELERKDAEIQKLKNVITQWEAKYKEVKARNAQLLKMLQEGEMKDKAEILLQVDESQSIKNELTIQVTSLHAALEQERSKVKVLQAELAKYQGGRKGKRNSESDQCR

SEQ ID NO: 1913 - DNA, 2187 bp, Homo sapien
aagcttaatagaaaatatgagcaacatacacaaacattagcaacaatgatataaaataccacttaaacataaggaaaaatgttgcccttcacttgtggaagaaatgcaaatgaaaacagccctagggatgttgacgttggggtggcacctgctgcagagggtaacgtgcagcatgtcgagggcagcactgccaaggctggtttgagctcaaggtcaggtggaggaggtagtctctcccatctcttctgcgagtgcagctctaaaccctgcctgaaacacgtggagaagctatctgagctgcctccaggacacatgcaaatggacactctgatcataaaattatcaggaagattgagaaataagacaaaaatggaggtgccaccaaaccagtggaaatttttccccttttcattcctctggcattccctggccttgactcaaggcagcccacactctaggagcagacaccagggcacaggtggggagctctgggggaccctccaggcttactcagtgaatgggttagcagcagccacaggagccaccatggagcctgcagggacccacaacactgagggcagggatcttgcctctaatcagataagctgtgattccccagagggtgggctaaaggccacgggtctttttctctccacatcttcccacgtcatgaccccagagggtcgaagagggagaaagtgtgagcaccgtgacataatgagccgcagccttctgactagatgccccaaagaagaatcgcaggtgaccacacagcatcagagaaactgcagggtaatgagcaactttggaaagcaatccatcgtgttgtcagtaaaacctctggctcactcccgagctgggcatccatggatggtgaccctcgatggaatagactatgaggaaccaggtgaggggatctacctccaccgagacgtgagagtgacctgcatacccaaacaccatgaggctttaaagactgagctgatgtggaagccacagcctctgcaggttgctctgcacttgcaacataagcccaaccacatcaattgctgcaaaacaaaactacagcattctccataccacttaaataagacacagagtctcacaacattcaaaacgcccaggacacaatccaaaattacttctacaaaaaatcaggaaaatctcaatgagcaaggaaaatggcaatcagtagctgccagtgctgagatgacaatgagggttggaatcatcaacatctttaaagtaattatcataagcattctccagcaagtaatggcaaacactcttgagataaatggaaagataagaaggctcagggagaaagtggaatgtacaaagaatgaccaagtgggaattgcaccactggaaacaaatcaccaggataaagcagtctctggctgggccaacaggagaatggaaatgaaaagggaaagagttgttatggcagttgtccaatttgaacaacacaaaagacactgatttaaaaaaaaatgaggcagggctcagtggctcacacgtataatcccaataccttgggaggccgaggcaatgtatcacctgaggtcaggagttcaagactaccctggccaacatggcaaaatcccatctctactgaaaatacaagaattagctgggcatggtggcaggtgcctgcaatcccagctactcaggaggctgaggcaggagaatcacttgaactcgggaggtagagggtgcagtgagccaaaatcgcacctctgcattccagcctgggtgacagagggagactctgtctcaaaacaaaacaaaacaaaaaatgaacagcacctcaggaacaataccaaaaagtccaacagctgtataattggtggcccagaaggagaggagaaagagtggagtacagaaatgagatctgaagaactaatgactgataatgtttcaattttgaaaaaggacataaacctaaagattatagattcaaaagcccagctgaattcaaataggataaatacagatgcagatatattatcattaaactgtgaaataaattggttttgtcacaagccagcattgtgactgtgggagaaaagagatcaaaagtacacaaggaaggaaggaaatacagaatattatggccatgggaaagaggtgtcagtgtgaatacatagaacagcacacttaagcaacaaccccaaatgatggggc

SEQ ID NO: 1914 - protein, 467 aa, Homo sapien
MLPFTCGRNANENSPRDVDVGVAPAAEGNVQHVEGSTAKAGLSSRSGGGGSLSHLFCECSSKPCLKHVEKLSELPPGHMQMDTLIIKLSGRLRNKTKMEVPPNQWKFFPFSFLWHSLALTQGSPHSRSRHQGTGGELWGTLQAYSVNGLAAATGATMEPAGTHNTEGRDLASNQISCDSPEGGLKATGLFLSTSSHVMTPEGRRGRKCEHRDIMSRSLLTRCPKEESQVTTQHQRNCRVMSNFGKQSIVLSVKPLAHSRAGHPWMVTLDGIDYEEPGEGIYLHRDVRVTCIPKHHEALKTELMWKPQPLQVALHLQHKPNHINCCKTKLQHSPYHLNKTQSLTTFKTPRTQSKITSTKNQENLNEQGKWQSVAASAEMTMRVGIINIFKVIIISILQQVMANTLEINGKIRRLREKVECTKNDQVGIAPLETNHQDKAVSGWANRRMEMKRERVVMAVVQFEQHKRH

SEQ ID NO: 1915 - DNA, 7094 bp, Homo sapien
  Unsure 7004: Unknown base
ttccggcagtggctcatgtctgtaatctcagcactttgggaagctgaagtgggcagatcacttgaggtcaggagttcaagtactagcctggccaacatggcgaaaactgtctctactaaaagcacaaaaattagcaaggcgtggtggcacacatctgtagtcccagcactcaggggactgaggtacgagaatcgcttgaactcaggaggcagaggttgcggtgagccaagatcaggccactgcactccagcctgggcgacagagcaagactctgtctcataataaaaaattttaaaaaatagacatagtccctgcattcatggagctcaagaactagtaggaaaaacaggcattgatcaagaaatcacaaaaacaactaattataaactctcactgaagaaaagaaataccatgctctgagaacagtttatataaaataagggtaccagaccaagtccaagggtcaaggaatgtttcctctagaatataatttctgaagatttttcctcttcttttttcttttttgagacagagtctcgctctgttgcccaggctggagtgcagtgacacaatctctgctcagtgcaacccacgcctgccagattcaagcaattctccctgcctcagcctgccaagtagctggaattacaggtatccgccactacacctagctaatttttgtatttttagtggagatggggtttcaccatgtgggccaggctggtcttgaactcctgacctcaggtgatctgcccacctcagcctcccaaagtgctgggataacaggcgtgagccactgcacctagcttttttttttttttttgagacagagtctcactctgtcacccaggctggagtgcagtggtgtgatcacagctcagtggcacgatcacagctcactgcagccttgacctccctggctcaagtgatcctccctcctcagtccctgagtagctgggaccacaggtgggcgctaccatgcccagctaatttttgtactttttgtagagatggattttcaccatgttgcccaggctggtctcaaattcctgggctcaagcaatccccccacctcagcttcctacagtactgggattacaggcgtgagccaccgtgcccagccccgagtgttcttctttccctcttccacatacacctcctccaagcctcaccattaaacctcacagggaaagacaatgttaaatatcttcacagagaaatccaggactgagtatatattctccatatgcacttgtaaacctcccataatgattcaccttgccatttccatgtgtctagtccacaatatcattttatctacattatctggcttgcatactaatcacaaccttgtgacataagcaggcgagtatgactatatgcatttttttctgaagtagaatgtgacaaaggctaggtaacttgcctaaaatcacatggctcattaatgggggtgctgggacttgaacttgggtcttgtaagacctagatggcattattcttgtaatattcattcttttatttattcattcatccatagacatgtattgatcaccttttgattagctgtcaggctatatatggagccatcaggaaccactgaaggtttttttttttttttttttttttgagacggagtctcactctgtcacccaggctggagtgcagtggcacgatctctgctcactgcaagctctgcctcccaggttcacgccattctcctgcctcagcctcccgagtagctgggactacaggcgcctgccaccacgcccggctaattttttgtattttttagtagagacggggtttgacggtgttagccaggatggtctcgatctcctgacctcatgatctgcccgcctcggcctcccaaggtgctgggattacaggcgtgaaccaccgtgcccggccgaaccactgaaggtttttaagcaggaaagcagagctgttttctggatgagcaaacagaaagtagtggttttccaagtacagtctgagacaacctataggaccagaatctctgcagttgaggctcaggaatctggtaatcagccaggtataggaactcttttctgattgcaatgcagtgaagagcagaagcactgtattagagaaagaggcagtgcaaccaggtaacgtgaccaggtgagaagtgatgaggtacagagacaaagagatgcacttttgagtcacttagatggcactgataggacttccactacaccctcgcatagacagtggctgaggttcaggaaatagagctggggttcctacttggatcctctggctctagagctttactgcacatagccatttatacccacatcttgattttaattattttatatctatgtttcttagcactttttgcaaatttccaccttatctcaaactgccctcaagccttgtatttctccttcgctttcataaaacctaggaaagaaataagggacagccaagtaaaacttttaaaagttttagaacatttatttctttggggctggttacacaggcgagaaagaagtagatttggttagggagagaaaacaacaggccttggggagatacactggctctccccctccctaaaccctaagaggcctccaggaaacctgaagacaataattccagaagcccagagggtgaccccatttcctctctccatggttattactgtcagtctggagcagttcaggaattcaggaaactataaagaaaccacaacagcctcaacaacccaaacatcaacatcaacaacctcaacaataaaactccttaaaattcatctccttccacccactcacaaccgcagactcgaagctaggaggtggaagggactacagaagctctgcgttgcccaggttagtatttgctcatcacaggcctgggtttcccaggatctcagggagcctggaaactgacgcctccatttctgggtgggagcaccaaagcctaaggacacctttcctctctcttcactgctaagcaggtcaagattaaagcaaaccgaggcaaaggccacggttgacagttccaagggaacccgcaaggccgcacaggatggggtggacgttttacgggagaaaaggctggggaagtgggcgggcgatggcctacgacgggacttggggcggggtgtgcgaaacgcctggcaggcgggcccttgagtatgaccaatcagaatgcggactgcgtcccaggggcggagcagaggcgtatcttggtcgagattggatagcggcggggcgcaggaaagaggtcgcgccagcccgggcaggcagctttgcaagtccgcgttatatatcgcagtggctgcgcccgggatagctggctgcgccgccgcgcacatgcctaggttcgacgccctcctccctttgcccaggagttccttctgtcccggctctgttccgtctcgccccgaggttcacgccatcctcggagccccagcctttcacccagcgcctccaagctttggaccttgacttctgcaaaactagatggtcacagccatgaatgtctcacatgaagtaaatcagctgttccagccctataacttcgagctgtccaaggacatgaggccctttttcgaggagtattggtgagactttgggagagggaaaggccatgccagggccccggggccggggcgcgagggggtggcattgaatgcccacaatgattttcttacagagcagagttatgggactcccttgtactggcttcacactacctttgtccgaggtgcaggtagtatgtggcacctcaaagagattagagctgaaagcaagcaagcagaaataagaggatgagggagaacgtggaaatatacagaagtcaaagagagcgtgtagtgagaagggtcttggaggcgtgaggttgatctgaagccttactagatgacttccccgtcctttgtggctgtgtgtgcgcgcgtgtgtgcacagtgcagggcccgggggacagcctgccctttacaattatcccatcgttccccaggtgctccaccgttcctgctgtggagaaggaggcgaagtcagagagctcttccaagctttccccaggaagagctctctggctttgccttaaagctccccagaggttttggaggctgactttatgctccaaccaatttgccataccccagccagggagaagctattgccacattcttcttacgccacagccctggtatgcttctaggagccccaaccagggagaagctattgccacacttcttacaccacagccctgggctgcttctaggcgcgggccagacagccgtcacccacctctaaccccactgagagagcaataatcacagaaaccttggacatagctcctgccctgtgctagatactttgtatacgttaatacccccaggagagatgtagtattcgcgctctacaaatgaggaagccaaggctcagagaattaagttggtttttccaatgtcacatagctagtaagtggcagaactgggactccaacccagagcactcacctggagagatgagtgggcatttctctaatcagcacccacccatgagcccatccctctgccttctgcttgccagggcaacctcattccccatagccctgatctacctggttctcatcgctgtggggcagaactacatgaaggaacgcaagggcttcaacctgcaagggcctctcatcctctggtccttctgccttgcaatcttcaggtaagaccccatcccactccctgcctcttctctagatcttagaccaccattctatcccttgaagctttcccgattgcatcaacctccatcctgtccccaagttgccttgtaacactctccccatctcattctcggctttagttcccctcccagccttcaccctcttctgttatattatcctgttttccttctcttttagacccctacctggtggtctctgctttgtccctcttgccttcgtagagtctgtactcgcaactaatttctccagcctctaatagtgtcacctcctaacaccctctctcaagaccctccaataacttccccatattttctcccccaaactccttcagtcttcccytatccctctacacatctcctcccaggctcctaacccctcccaagaaccccattccttaactcaactttcagtcccatccccctgcattccctgatctttctccagccctcrtctcctctagactactgattggatctaccagattggcttcaggatctcaggagctttgacccacccsctgtggacaggtggggaggtggtagagcttggaacacagtaacctggccaagccgggggaagggtggattattggtgcctggggatgacacttacaccatcttcctttgtcccatttcagtatcctgggggcagtgaggatgtggggcattatggggactgtgctacttaccgggggcctaaagcaaaccgtgtgcttcatcaacttcatcgataattccacagtcaaattctggtcctgggtctttcttctcagcaaggtcatagaactcggtgagtggcaaagctttgtctttctggtgccttgtgaactgcatccttcctcagggccctcccttcacccatcccatggagggtctctttcctacccttgggtcccaataatacctctcacccaagcccctctacagattctctgccacaaagacccccttccctcccctgagaatttctcccgtgtccctacatccagtgcagagggtggtcccagcactgggtggtatgccaactatgactctccatctcccaggagacacagccttcatcatcctgcgtaagcggccactcatctttattcactggtaccaccacagcacagtgctcgtgtacacaagctttggatacaagaacaaagtgcctgcaggaggctggttcgtcaccatgaactttggtgttcatgccatcatgtacacctactacactctgaaggctgccaacgtgaagccccccaagatgctgcccatgctcatcaccagcctgcagatcttgcagatgtttgtaggagccatcgtcagcatcctcacgtacatctggaggcaggatcagggatgccacaccacgatggaacacttattctggtccttcatcttgtatatgacctatttcatcctctttgcccacttcttctgccagacctacatcaggcccaaggtcaaagccaagaccaagagccagtgaaggtttggagagaacaatgaagctccaggctctctcttctccagggcaccaagaggctgggcttagttttgggagaatgattaggttgccttacctgcatggtttccccagaggatgtgtgccccaaggtggctggaatttttgacagacaagaagggtgaccttgggatgggggtgtggtctgttactttaatgtttctgtttttaatgtgaaggccaagcaggccctgggatgggagtggggcggaggagggtcctaagagctgattatttaatttctatccagaaatctttcttcttcttgctctgtttttttaaattaaagatttcaacaaaattttgagagttgggggatttggggggaaagagggctgctgtgatggcaggaggctgctaccaaggggatgatctgcaggtgggacgcctgagggtgtgtggaagggtgagaggcacacacacagacactgaaagaatcctaggcctggtaggcacttaacaaatgtctgttacagaccagaattttattgctgttagagacccaagcccctcataggaacagtgagaaacaggtgcagaaaggcggagtaactttatctaaagtcataggctccctgaatagcagagctgacacctacaaggaagcgttggagaccagatctaccagctagcctccctgagaccacgaggtggcgccgcagcaccggctgtggccgatgccagccaggtagccggtttcccacgtcccccgcacgcacgcacctctttgctgcaggaatcccgggctgccccgacctggagtaggnggggtggtgagtgggactgagtccctagaagcctggaccctcasttcgttccctgtacatccagctcgcctgtagacagtgggggaggat

SEQ ID NO: 1916 - protein, 236 aa, Homo sapien
  Unsure 7004: Unknown amino acid
ATSFPIALIYLVLIAVGQNYMKERKGFNLQGPLILWSFCLAIFSILGAVRMWGIMGTVLLTGGLKQTVCFINFIDNSTVKFWSWVFLLSKVIELGDTAFIILRKRPLIFIHWYHHSTVLVYTSFGYKNKVPAGGWFVTMNFGVHAIMYTYYTLKAANVKPPKMLPMLITSLQILQMFVGAIVSILTYIWRQDQGCHTTMEHLFWSFILYMTYFILFAHFFCQTYIRPKVKAKTKSQ

SEQ ID NO: 1917 - DNA, 830 bp, Homo sapien
attgaactatctatgattgaactatccatgataacacagtgtactatccatgataacacagtgtactatccatgatttctagaatattacattcttttaaaaagaagagatgtgttcagtgtacactgattgagccaggcatggtggtggaatgagaaatacaatctatttagtgaaatggaaaattgcaggacaagagagaaatgtaagtcccagatgtgcacagagcactttgctatggaaaccacagagaaggggcatccacctcagcctggctccaggttcgaaatggagagactatgagcattttcagctgcactctcatagaagagaggaacaatccttcagaccaggggaagacagaaaaggagactggccagaagaacacctgggagggagcacagagctcttcattcccaggggttctttatagcatggacatttacagtgtaggtactgcccaaatgcccatccacaccagtgttagggactgaattttgtttatttcatttatcaagatataatagttttgagtcatcagttgtatttctatagcctataaaaagagcaccaggcaaggcagggcccaccaccgctgcagccacacccagagtcttccccatgctgtactgtggactccacatcagacctgggaggcaggactcagtggatgaggctgtgttttgcatttctgagtacagtccacaaaatggtttgcttctgaaaaagcagtagtagtcttacatccaagattattcctaaaataaagtttcgacccacatatataatgaaattgaaactgcctacattggcaaatgccatgaaatgag

SEQ ID NO: 1918 - protein, 93 aa, Homo sapien
MRNTIYLVKWKIAGQERNVSPRCAQSTLLWKPQRRGIHLSLAPGSKWRDYEHFQLHSHRREEQSFRPGEDRKGDWPEEHLGGSTELFIPRGSL

SEQ ID NO: 1919 - DNA, 771 bp, Homo sapien
atggcaccggccagagcaggattctgcccccttctgctgcttctgctgctggggctgtgggtggcagagatcccagtcagtgccaagcccaagggcatgacctcatcacagtggtttaaaattcagcacatgcagcccagccctcaagcatgcaactcagccatgaaaaacattaacaagcacacaaaacggtgcaaagacctcaacaccttcctgcacgagcctttctccagtgtggccgccacctgccagacccccaaaatagcctgcaagaatggcgataaaaactgccaccagagccacgggcccgtgtccctgaccatgtgtaagctcacctcagggaagtatccgaactgcaggtacaaagagaagcgacagaacaagtcttacgtagtggcctgtaagcctccccagaaaaaggactctcagcaattccacctggttcctgtacacttggacagagtcctttaggtttccagactggcttgctctttggctgaccttcaattccctctccagggctccgaaccactcccctacacccagagcattctcttcccctcatctcttggggctgttccctggttcagcctctgctgggaggctgaagctgacactctgttgcgcaagaaagaagtcactgttacagaggcaagcggtggactaggtaagagttcactcatgaaggaacgagtgctctgaagagccagttaccctgtgttggctgcaataaaggtcattacctctctagccaaggaaaaaaaaaaaaaa

SEQ ID NO: 1920 - protein, 156 aa, Homo sapien
MAPARAGFCPLLLLLLLGLWVAEIPVSAKPKGMTSSQWFKIQHMQPSPQACNSAMKNINKHTKRCKDLNTFLHEPFSSVAATCQTPKIACKNGDKNCHQSHGPVSLTMCKLTSGKYPNCRYKEKRQNKSYVVACKPPQKKDSQQFHLVPVHLDRVL

SEQ ID NO: 1921 - DNA, 5276 bp, Homo sapien
ttaaaatttagttttcatcccaagatgtcttttctgcctttcttttgccttatttacaagcatggataaaaatcttaaaggtttaaataaaaatgatcaatataatggtgaatcttttgagaaatctcttaactgcattggtattttttctctgtgaaagatgactatgataatctggtacaaatggttttatgtcaccaattttgctgcaagaatgggaactgcttttaaatctgtaaatagctcttaacatttgttgtatgcactcttttcttactatggctgtcaacacttgtgtagggtttaatttctaaattgttggcatgttctttttctcaggctattcagaagtaacaacatttttcatttcagacatgcaatcacctattaatgatgaaatattttaccactttgggaatatttaattagtttagtcatggagaatacttcccacattttaagatttttcaaatatcactgtcatttctattttagcattttatcaaattattgcttttttattttataataaggcttaagacagattatagacctccttaagagatgagtttcttcttctaaaaatgcatgttgatagaggactatttaggctaatcggaggaatcattaagaaagaaagttttaacactgtttatccctatctgctttccttgcactttttctgtgaaaaatattttctgtttgcaaaatcttccctgagttctgaacccagcaccatcagtaccaaagtcttatgcaatatgtatttattatgctcctgaaataggcctcttcttgatgagacccaaactattacaaaaatatcagtattcatattttactcacaattcatacccgtgcttacttagttggcattttagtgctttgaatttctatcttaaagcacagaaaaaaaaaggtaatttaatccaagtattctatcatcaaaattattgtctgattatatgaagataaatgactggcgactctggttgtgtgtgtatgtgttttgcttttactttaattcttgcaatccaaatatagaattatatatttatctattattgcctttattctttaagcacttgagtttaatgattattcttacctgagaaaggaagaaatttaattctaccagtgatgaatacttgaaattaattgaactcataccaaaagatgtaatccagtttctcagtttgaaggagaacgtttgactcactttcattgttcatgctagctgaatataatcaagacttttgatttgatttgcttttattattcaatgcagatagagcctgataagttttagaacatttaaagaagattgaaatctcagtcagtaactaaatgataaaatgagattgattggcttatactaggtacatttatttttgaaagaattaatgtaaaataatagttatttttaaagcagctaatattacactgataatttgttgctaaatttagtgctgtccacatcataggtgcttaaatatgtactggttaactagaggggggtaggaaagcaagcggttttatcttgttcttacctttttgcaggaaaagtggctttaaaaaaatttatataataaaactattttggaaattcattcttttagaaagagaccttgagataaatattttttgactctggatatttctatagttctgaacacagattttaaacccactatcaaaatgaaaacaatataaagctatattagtgagtctccatgtagcagtttgtttttatagttactgtttcatgcttaaaacttcattcttactttcattaatgttacccttcactggtatagccactcactaaataagtatatttaaaacatcaaaattttgaactaaagtttgtgattctcttattcagcaatccttatcttatgctggctgcatgagttaattcaacatccagattaaatatcctgaagtaggttctatatatttcctcatacaacagacatggaatggaaatgccactagaaactgccctgctacttttaagtctgacctttgcaggaggtacactttgctgttctatgattgtattcacctacctaaaatacaaatgaagacagaacatatcatttactgcacgatgaatttttcatttattaaatgaaaaacgtttgctagacattttaaatattaagtattttgactacacggattaatttaaatgattctatcaggcattctgatatttaacaactctattaaaatatttatagaaaaataaaagcaaattgatataaatttttgagcaattctatttttgtagaaaaaagataacctgtaattataaagatgttttttgaatgtgtagtatcctagaaaataaaagttcttgtgaaacttaaaaaatgaatgaaaaccaactaatagcatgcaagatcatagatcctgcattaaatttttatttgtgaaaatttgaaaattatgagctataacttataaagtttgccttcttatgtctaaaatcttttaaaggattatttgcatttatgtaaaactggaaatgaagttatatatgagtgcaaagaaattgacttctgctcaaatatgtgttgataccctacagtaaattgaattaaatttttatcccaactgtttgattttattatttcatggactagccttacgttaagtgaaatactatttatgttgttaccacccctaagagtgactctgatatattatggatgacccaggacggtcttaaaggtctagttttaaaaactgcctagtttgtaagtatttgaatccagttcttttctaaattttaataatttgactcaaaatttttgctacagggtcaacttttaaattgtatatttcctctgaggcacactgggcatttggagaatggttcttcactggtgtagagagccaggtttactgttggttgcaccatctgttatcaggcatgcagaaacatttttcttctggagaaacagaggggaaggtgttgttacagtgtacatgtttcctctgtgtcgtttttaagggaaataaacatgttccaaaagatgctgttaaaataaatatttgaacacgttttctgtttctaggttgctcttaattccaaacatttaaataaatgtgcatttgaatagctttaggtggtttagtctattagctgaaatggaaaagttcatgtattgacatcatcaataatacttcataaaggtttatgtatttttatgtgtttggattccataagaagttgaacttagataattttatcaagagtagcacagtgtttctcaggtgcgagccagcatacagcgagacccttcatgtgtctctggatgcacatatatcttcccaaccttaaacacagctcattgaaatacattaaagctactgaaagtgagttctgatgcaaaacacatgtgaggtgtgtaggaacaatgaaaagctagaggatctggagttagaggaggcattgagagtgcttttcccttaaacgccgtgatagtcctcccttgatctagaagtattctctttgaatccttccatctcttcctcctggtacaccagatgacttcatcagcatctccctcttttatgctaacacctttcgctgtcaacttttgagacctccccatgtatctataagcttcccagtctcttatggcaaatttaaaagtttacaaataggttctctcattgaaaaaaagcattgtagtaaagtttaaagtggagctcagacaaatcatgacttattaagagactacaggaagccattcagcatttaataataactgtttacaacatgaggcaaagctaataatattatggttttattaagagatctgtcatctctgtttttcttaaactggtttaacagtcagagctttgtaatgtgtttcagctgaagatttattataggcttgtaaattatctaaatgttctttttagaccccatgacaggagcacagaggaactgagataactctgtgttatgagagggtggatgctggcttgtgccaaaattattttagagtcctgctctttagggaaaactttgctatggtaatgtttctttgaaaacaaatttaccagcaactgcgttacttggtgttttccaaagtacaacatccaaggcttgaaccttacccgtttctaggccagactaggccagcctctagttttgataataattcatacctttattggaatatattttggatagcagtgaagaattgaaagcagctcctaaagattggtttgtttgctttgaaaatgtttacacttattcactctaagcagtggaccattttgatatcaggccctatacataagaccaaaaccagaaatatttctaaatctcaaagatttataagtacagtacctctggctgaaaactcgttaaacatctttggatattttttctttatatctttatgtaattatttctgtaattaagtgtacattagggttatttgctacttaacaagcctaaaggtatagctgtatatagaatgtgctctgtgtttttctgtttcctgcttggtttgtttctggtatgactatgtctactttttatttaaggaattttgtgtagataatactctcactaacttgtaaataggataagttatgagattttttggtattagaatttgtaataataatgacttttagattttatttgaaaaagctacttggaaagcagtaaatagaactatagtgatatatatagatacatagatatatacttttttctgagaatgtataatatataattgtcaaagatttttggaagtctttcaaaatatacttaataccattttgagaacataccttctaatttatttccataaggctgaagaacttttatttacaaaatgtaagactagataatgtatgaatcagtgttactaggacttatcagtacttaaaatagcaacttggcattctttattttgtttcctggttgttttatttggagggataataaatgtctaagttatttccattaaaattttgaaatgtttgtatactttatgtgtgccattttaaagtatatgcaagttctaagcaataatctgcatgttatacaaggttgacatattttgtcctgaaatttttagttaacatttcaagaatgataaaatgaacaccctgtaaattacccttctccccctcccctccatgaaaaccttgggattttcttgtgctagaacactaccacaatgtggtgcaaagctttgtattttgtggaaaaaaacaataaaatcacaattatttagtgc

SEQ ID NO: 1922 - protein, 32 aa, Homo sapien
MKTLGFSCARTLPQCGAKLCILWKKTIKSQLF

SEQ ID NO: 1923 - DNA, 2138 bp, Homo sapien
  Unsure 435-496: Unknown base
taagatccctgtttctttgacctctgtcagccagcgagctgctcttagctcctagaagctacccttattccaacccaacaagggtgctttgaatctctgacttcttggtctcttacgcagatttatagtccatgaacttaggtcaggcccacctacataaactatttttgctcagagtcacctgtgccttataataacctaatcttggaagtaaaatccattatattcaaagtccagggcactatacagagatatataccagggttggggaatcttggagacttgtcttagaattctgtctaccatagagactgtggcagctatcatggtaggaagtggggagggcctaaagaatgaggatttgacttatgagacaaggcttggtgactgagtggatgtagaggagaaaggaatacatgatagggagggatgggnnnnnnnnnnnnnnnnnnnnnnnnnnnnnnnnnnnnnnnnnnnnnnnnnnnnnnnnnnnnnngtttggataaaaatctcgagttgagatctgagagaccattctgagggagtgtgtgagtagaagaccaagatttgaaccctggtaaacatggtgcaagaggaagaaaatgaaggagacattctaggtggaaggagaacggtagtattattgggatggtaaagagaagagtttaaagatatttggaatagtgaattgtgtttggcacgaggatttgtgacagccatccttagctctgtcagctgattatcgactggggccgggagtgtgggcagtggagactgtttggaaatgtatggtggtgttggagattgccacagtgattgtaggacactactgccacttactaggctggggctagggatgttgaactttgtccagtgcacaagaccatcccatacaagtccaaaatttaatagcacctctgctgagaaatataatgccagggatctatttcagttctccacactccattggtcaccatgttcattcatgtctgccttctaaacatctcaatctagccctttcttcccccttctcagagccactgccatacttgaggcttccattgtctcctgattggactatttatattgccgtaacttcctaccttgattgtctattgccactctctttgccacctcccttctgtttaccaccagaaccgtgaatctaaaatatttcctcttcattaaaagtgaaagaacattatcacgtcatttcctgtttcattaaaagtgaaacattttttaaaaggaaaaataatagcccttcaaggtctggcgctaagctcattttctcgcagcttcaccatggtatctatcttgtattccagctgcagacctccacattcctcagataagtctttccttttttgtactcctttatatgtcagtgtgttcctccttttgtctgggctgtcatttcccttacccacatagagaactccttcctttcaagaatcaactcctgtgtcacctactttgccagtacgatctgttcctctctctctctcgctccaaaagactaatctgcacactctgttacagcacttgtctaattgtgctgtagcgtttatttacatgtttgtttctcctctagccagtgagcacctctcaagcagaattatcttccttgtttctctggcaccctaaatatttgttgaattaatagtccttctcttcttttgtaattttgctttctgtaatagaagcttaattttaagtatagttatatcagtaatcaaaatgaatcacacactgagaaatcaatgtggatgccctttaagggttctgttattttttttattgccattgagtaaaataagatactctgtgataaagtatattagcattaaagtgttcaaatctgatctttattagtaggcctcaagtgaatccttgctgacatttaaggtttatgacatttccttcacgttcgttcttgactggaaggcataaatggctgacagtaaagagcaattaataattttccaagtaaaacattttcagggacatctgcctttattgctccccagatgagagtacagcctgtttcttatgtgttccaaagatgatttccctatcagctttttggtcagttaaccagaaaaaattttaagaacagataagaaatattaagaaaa

SEQ ID NO: 1924 - protein, 76 aa, Homo sapien
  Unsure 435-496: Unknown amino acid
MPGIYFSSPHSIGHHVHSCLPSKHLNLALSSPFSEPLPYLRLPLSPDWTIYIAVTSYLDCLLPLSLPPPFCLPPEP

SEQ ID NO: 1925 - DNA, 862 bp, Homo sapien
gatatgggactacattcaagatgaatttggtggggacgcaccaaaccatatcgggtagcaacaacctagggtcagttttgcaggtggtaaagccatttaccaagatagttgtaggtaaagaagggcagatttattagagaaattgtgaaaatatgttgcagtgggcagctcagcagagaaggggctacctgcaaagaggcaagggctggaggaaagttttatagggtcctgctgaagggtgctacgtgtggaatgaggtcattgtgcccgcaggttgtttgtgattagctgtctctaacaattgttcatacaataattgttcattattgttctcaacttggggctctccccaacctggggacccttccttattgttgcttacttatcaggtctccacataaaggtgtggaaacttcattcattcatatcttcaacacaaattgtaggtagcctgttttttaaaacatttattcaacaaatatttagtccaagccactattacttactaccttctctactattgtatggacttttaactatctctgacactattcactattcttccacattctctattatttatacctatggtaaaatttgccagtttgaccatacaactaatactcacagggaatatatagagtctagaagaaaatatacaggtccttaaaggctgccctgccaacaaaaccataacgcaggaacaaacatcacaactatgccaaataatcaatcctacaatgtccaaaattttactttaaaactggaattaccagacttcctttctgcattaaccagtttaactagacagtaacgaaatattcctactttatgctgtgatagtttgtttgttgtttgtttg

SEQ ID NO: 1926 - protein, 44 aa, Homo sapien [sequence omitted]

SEQ ID NO: 1927 - DNA, 2034 bp, Homo sapien
gaatttccagcaggcaaggcagtggccgctttgactgcttgcttcggagatccgagacgacggagaaggcactcttatttaccgaccaagaaagctcctcccccgtcctccgttagctaattaaaacatttttcagggacgtagccatccagagacattccattattgttccattgacctttccctcatcactgagtcctttggagctgagttatgtcaacagctgccttaattactttggtcagaagtggtgggaaccaggtgagaaggagagtgctgctaagctcccgcctgctgcaggacgacaggcgggtgacacccacgtgccacagctccacttcagagcctaggtgttctcggtttgacccagatggtagtgggagtccagctacctgggacaattttgggatctgggataaccgcattgatgagccaattctgctgccacccagcattaagtatggcaagccaattcccaaaatcagcttggaaaatgtggggtgcgcctcacagattggcaaacggaaagagaatgaagatcggtttgacttcgctcagctgacagatgaggtcctgtactttgcagtgtatgatggacacggtggacctgcagcagctgatttctgtcatacccacatggagaaatgtattatggatttgcttcctaaggagaagaacttggaaactctgttgaccttggcttttctagaaatagataaagccttttcgagtcatgcccgcctgtctgctgatgcaactcttctgacctctgggactactgcaacagtagccctattgcgagatggtattgaactggttgtagccagtgttggggacagccgggctattttgtgtagaaaaggaaaacccatgaagctgaccattgaccatactccagaaagaaaagatgaaaaagaaaggatcaagaaatgtggtggttttgtagcttggaatagtttggggcagcctcacgtaaatggcaggcttgcaatgacaagaagtgttggagatttggaccttaagaccagtggtgtcatagcagaacctgaaactaagaggattaagttacatcatgctgatgacagcttcctggtcctcaccacagatggaattaacttcatggtgaatagtcaagagatttgtgactttgtcaatcagtgccatgatcccaacgaagcagcccatgcggtgactgaacaggcaatacagtacggtactgaggataacagtactgcagtagtagtgccttttggtgcctggggaaaatataagaactctgaaatcaacttctcattcagcagaagctttgcctccagtggacgatgggcctgattaccagctgggacttagagtttctgtgcaacagtttttcactgagcatgtcaagaaactgataagatcaaaaaggtctcctaactcactagatcagcgcacaagtcagtgtaaaccacttagatagtagttttttcataaatgctcatcatatttatgttccgctgtacatgttcagtataaatatatgtgtagtgaagctactgtgagtctttaaatggaaagagcaaatgagaagtggtttggatacacttgatgagagatgagagtgtcacattaataatttttaagactcttaggcagctatgggtttcttttgatcatttttgttctttattcatttgaacacgtttttgaagttcttcaaaactagtcagtttgaattttgacagctattcaatatgtgatctccaagtttaaaaaaatttttttccagacttccctaatcctaaaatgcgagtttttatttttaataactgtaccaaggaataagtatgaaaacagttctctgttaccatattttgtattctggaccacttactggtgaaagcaaccatgcaaaagaaattaatttggccaggcacagtggctcatgcctgtaatcccagcactttgggaggccgaggtgggtggatcatctgaggtcgggaattcgggaccggcctggccaacgtggtggggccctgtctctagtaaaaatcc

SEQ ID NO: 1928 - protein, 372 aa, Homo sapien [sequence omitted]

SEQ ID NO: 1929 - DNA, 4090 bp, Homo sapien
gtgattaggatgaaataattgtacgtaatttattttagtactgacagtgttacagattctaatttatggtaaatttcagatgtttatttaaaattttcacttttaaacagtaaccaaatctaaatttaattattcaggttttacaaaagttgatacaccttcttatagtataggtaaattttctttttcaaatccaatttaaaataacctttccttttaaatgtgctgcaacgtttttaaaaatgcagcagcataggagtgaacaacagcaacacaaaacgggcattggtttcttaggagtggcttgcttacgttttcttcttttttcttcaccaaaaccaacatgaaagtaccactgaagtaaaacaccaactacctaccttactataaaggaaatgttaaaatttttttcacaataattttttcaattttcactattactgttgtaattattgattgtgattaaaatatttgctcccaggagaactcctgaccagtgggcatgtattcctattttatcctaagattttaatgagcaaaaaggggagagaatttgcaataacttcacaattaccttttctagtgcagttatattagaatgcacatgtttttaaaatgctagtataactagatagtatataatgtacagtataaagaggaatattgtgcttttgaaaagagtatactttttacttttatttatgtactagtagatgtaaaatttcacattgaaggtttatatatattggccaactcatatagaaattttatttataggaagctactactaaaaaaagtcactaactttgtgtacctataatccctaaattaaaattaaattttaattggctggctgtaatttgcattgagagaccttttactagtagctagtgttaggaagtgaacctaaaataagaaaatataatgatctgtgtttatcattagccttgtacaaatgtaaattactaatagtgatgttcttttgcaaggcatagaacatttgtatgaaaagacatttagtatgctttgaaaaaaactcagcttttagtttttttccattagaatactgcaaaacccatatatctttttaaaaaatttatgtactcacagtctttcccttgaagagaagattgaaaaagtctactgttcataaaccatgctaacattttccttttagctagttttgaaagtaaggaacaatacctgggaaataattaaacagaaggttaccattgtcagccagttggctatactgtggttagttctttcagaaattgtaaatatcttgtagcatattctgaaataatagagtaagttcttctcagagatgttaatatcatgtttttcatgttctaattagaatactttattacttacaaactcagaaatacgaacagaaatacagcagacgaacatatttattggtactgaaaagagatgtagtaaattaaatagaagaaatatatttataaagcttagtgaaacacaaaattagaatgttcatgtcaggcacaagggtttggattttgtgcaagctaatttggccacatttggcctggtgacagaactgttcataaggaagtaatatatagataaggtaggtagatatcagttgaatgccttatattgtatacattcctttcaaataaagaccttgagaaaacagcagagccaagtgaagatcacctaaagaactttgtggctaatttatacttcatgtagtagcagtgggtactgggcagggtctctttcccactctgatgatttgtgctcttatttttcctagatttacctcatctagggcatattcttttccctcttcctctttacctttcctggtcctgatccctctgtactcagttcccctaaattattggactacaaactaatatactagaaaagcatacacttattttatttgaatgcagaaatgctatctatcagtatatatacataagaatgtatattacagtatatctatatatacttaacactgtaactttcagtattccccagttagcgtacctaactctcctgtgggttttgttaattcttattagactactagagaaaaaccaactggcagtttgctaagcatatctactggtgttgtttctgcgccctcttttggctaattgatgtaattatactggctctaaagatttactgccccataagtaaatagtatagccacattctgaacatatcaaaagtacaaacttaggaggagtgtatgtacaaaaatgtaaaattttatgaaaatgaacatgtttttatgatgttatttctagttcataagaatgtgatgactgctttgcttcatttatgtacgttcccattatattcttgctgtcaatcaatcacaaatttatatcagattaggataaactaagccattttatgtattttattttaaaccttattttggcagagtaattccttagaattggaaaagctgttactttgaaattaccaatttattacaaaacatagaaatgtattgtagctacaaagacaaccaagcattttctgtgttttaatgaatatctaaaaaactacatttagtttattttactcagttttgaaatgatttttttactggctctattgccttaaaataactaagagattaatgattctttgtataattttccttttctttgttcttttttttacatttcgcagagttatatctatagttttagtaacaatttcttatgtattctggataactgaaaacaactaaaggtgttgggcattagaaaataattgtgagcagtaagattactgatgtaatatgtatgttggactgaagtatttctttataaacattctatttgattttaagcaaaatgtatgttaaagcatgtttttacatcagtaaagtcatttgtcgaccttctggaaatgaaaggtttttacctagatactgtaagttacacctccttaacaatcatatttgtcattgttgttttctgcaaacaaaaatgtttatgggcttcatgtaggcttaagattgtaggcaaaaatggactgagttcaggacccttcaagcagtaggcattcagttacagagcagttggtactttgtaacccagacttacagtttaaaaatatcaagttagctgatgtttcattataataaaaatactattttgcttaagagttgtattacaaatatttgtgcttaacattagaaatagctgttttaaattgtagttaacatattaactttttcagaaaaaaagcatggtttatttttaataatgaaatagagaacataatacgtaatgttcagtataacagctgagttaaaacatctgccaggattaacatcagtgcgtttttgccaatgcatagaggcatttttctctaagtatgatggctaatgataactattctttgttacacattcaagtcactcccatacaagtaactagtgggtgatatgtttcactccaaagggtgtattaattctgaatgctaatcatgaagacttaagttaggacaacacttcaaaccaggaagtgtgaactgatttagattatagctacacaattttctgtgtgttagatcatggggtagtttgagtgttttcacatgtattgctataaaatcacaatgtaccaagctctggtttaatatgccattaatactaattaatagagctgctagtctctctctggacttttctctagtctctgcttctcttgcgcttcctgtatcaatagattacttagctcaagtttaccaagtttaataacctatagttactttattgaataagtttctgacatgacctctaatatacatagatatatctagaatttatttgataaaattcacacatacaaatattgagtagtttgctaatagatacaaatattagattttcacacaactctactactgctttaaaaatataagtattggtaagtgtagcaaataagccatgtacatttaatgtgttctacttgctagtattaactgtatgattaatgaatgtgttatttaatgcccaagtttgttaacttttattctagaaatcatcctctgaatttattataaatcacagatttcattgtgctct

SEQ ID NO: 1930 - protein, 5 aa, Homo sapien
VIRMK

SEQ ID NO: 1931 - DNA, 1724 bp, Homo sapien
tcacaaggtatttgctaaagcattttgagctgcttggaaaaagggaagtagttgcagtagagtttcttccatcttcttggtgctgggaagccatatatgtgtcttttactcaagctaaggggtataagcttatgtgttgaatttgctacatctatatttcacatattctcacaataagagaattttgaaatagaaatatcatagaacatttaagaaagtttagtataaataatattttgtgtgttttaatccctttgaagggatctatccaaagaaaatattttacactgagctccttcctacacgtctcagtaacagatcctgtgttagtctttgaaaatagctcattttttaaatgtcagtgagtagatgtagcatacatatgatgtataatgacgtgtattatgttaacaatgtctgcagattttgtaggaatacaaaacatggccttttttataagcaaaacgggccaatgactagaataacacatagggcaatctgtgaatatgtattataagcagcattccagaaaagtagttggtgaaataattttcaagtcaaaaagggatatggaaagggaattatgagtaacctctattttttaagccttgcttttaaattaaacagctacagccatttaagccttgaggataataaagcttgagagtaataatgttaggttagcaaaggtttagatgtatcacttcatgcatgctaccatgatagtaatgcagctcttcgagtcatttctggtcattcaagatattcgcccttttgcccatagaaagcaccctacctcacctgcttactgacattgtcttagctgatcacaagatcattatcagcctccattattccttactgtatataaaatacagagttttatattttcctttcttcgtttttcaccatattcaaaacctaaatttgtttttgcagatggaatgcaaagtaatcaagtgtttgtgctttcacctagaagggtgtggtcctgaaggaaagaggtcccctaaatatcccccaccctggtgctcctccctctccctggtaccctgactaccaggaagtcaggtgctagagcagctggagaagtgcaggcagcctgtgcttccacagatgggggtgctgctgcaacaaggctttcaatgtgcccatcttaggtgggagaagctagatcctgtgcagcagcctggtaagtcctgaggaggttccattgctcttcctgctgctgtcctttgcttctcaacggtggctcgctctacagtctagagcacatgcagctaacttgtgcctctgcttatgcatgagggttaaattaacaaccataaccttcatttgaagttcaaaggtgtattcaggatcctcaaagcattttaaccttgccgcttaaaacccaatttaccgtgaaatgggaattttgctgcattgttaaactgtagtggaaaccatgctatagtaataaaggttatataagagagaaattgaaattaaatgtgtttttaaatttcaaaaaaaaatcaatctttaggatgacttaaaaattgatttgccatgtaaaatgtatctgcattttttacacaaaacttgttttaagcataaaattttaaaactgtactacttgatgtattatacattttgaaccatatgtattaaaccataaacagtataatgttgttataataaaacaggcaacaaatttataaataaaagctgaactactctct

SEQ ID NO: 1932 - protein, 45 aa, Homo sapien
TRYLLKHFELLGKREVVAVEFLPSSWCWEAIYVSFTQAKGYKLMC

SEQ ID NO: 1933 - DNA, 1311 bp, Homo sapien
gggggcgcggccggttactcgcttaccggaggcttcagtccccggcggcgcggcgacagctagggttcacggccactggggcagaggagccgcgagaagatgtgggtttttggttacgggtccctgatctggaaggtggatttcccctatcaggacaagctggtcggatacatcaccaactacagcaggcgcttctggcagggcagcacggaccaccgcggggtccccggcaagcctggaagagttgtgactcttgttgaagatcctgcgggatgtgtatggggtgttgcttacagattgccagtaggaaaggaagaagaagtaaaagcataccttgacttcagagaaaaaggaggctacagaaccacaacagtcattttttatccaaaagatcccacaacaaaaccattcagtgtattgctatatattggaacatgtgataatcctgattatcttggtcctgcacctctggaagacattgctgaacaaatttttaatgcagctggtccaagtggaagaaatacagaatatctttttgaacttgcaaattctattaggaaccttgtgccagaagaagcagatgagcatcttttcgctttggaaaaattagtaaaggaacgtttagaagggaaacagaacctcaattgcatataatttagtcttcagagaattaacttcagtgcacaatgacaatatgatttggaaatacgtttacttaaagatcttatttttaatgtagtgaggatattatttaaacttttattttaactggaaatgtcctgaaacacatatttaaaatattgggatacagtgaaagaaaaattcaaattttaataacataaagatttcctaactttatgttattgaacacttactcactagaagtgagttctttagaaaaatacagtgaaggactcagttcagtcttgtttttatcagagtgataatcatcctgtttcacatcccaatactattttgaaattctaaacaattaaaccaaaattccaataaatataaggttatgccttcaatatattcctatacaattctgtaaccatggtttaaaatacacaagcttaaaataacatgcttagaaatacacaataatatgaacagtatttcagccttaattgtgaatttccttgttattcaagtattaaatgaaatcttttgagtttttagccaaaaattggcatttttaaaatacgaaaatttccttggaattataatgtactgtacctcttcttttttaaataaaggcattttactatatggaaaactaaaaaaaaaaaaaaaaaaaaaaaaaaaaaa

SEQ ID NO: 1934 - protein, 184 aa, Homo sapien
MWVFGYGSLIWKVDFPYQDKLVGYITNYSRRFWQGSTDHRGVPGKPGRVVTLVEDPAGCVWGVAYRLPVGKEEEVKAYLDFREKGGYRTTTVIFYPKDPTTKPFSVLLYIGTCDNPDYLGPAPLEDIAEQIFNAAGPSGRNTEYLFELANSIRNLVPEEADEHLFALEKLVKERLEGKQNLNCI

SEQ ID NO: 1935 - DNA, 1947 bp, Homo sapien
ggttagtacactggtttttgctttggtctttctatgcctggccattttaccagataattatttcagtgaatttgaatttagtgtatttgtcacttaaggaagcttataggcttgggccatatacttcttttttggatatgttaaagaaaaaaaatgttttaggcttgttgtacccctgaagttgtagcattgagaactttgtttatatttgtatattaaaattgttcccacccccaaattattaaattggtgattaccttttttccctctccaggaagtatttatccatgtagataatacgttttgaagggctttggatatcaggggctgtgtatgaatccctatcttgtcaaagaaattatttttttaaaactttattttgaatttttataattctagttattcagctgaaactgagggattctattgccagcttttatgtaattggaaagatttaaatcagcttgtgttttaaaaagtaatgttgctactgtaagcagatgtactgtaagttagtgattatgtttgaccaccccctccaattacatgggtatagctatttaaacagaaaaaaacaaaaacaagcaaaaaaacttactaatacaataaatgtccatgtaacaaaggtatctgttgcagtgttcattttgatttacattattgcacacacactgggctagatttcttttttaaagactctggtcttccaccccaaattctgggcctttgctcatttggggtattgatactgaacatatacagccaattaatgtattcaaatggagccctaagatccactttgcagtactagatgtgtagatttacctatctttagcctaatacctttcttcatttatcatgtattcttagtcgcaggagctgctcagctcctgatttctgttattactgcccaggcatcctcccttcataagacatgcctatgaaatggacacaaaaatttggaacacaacaaatctaagacttatcataatagttttttgttttattgttaagattttgtcatgtcctgtcatcttttcataggtaagtttcagatcagattcttgttcagctcttaactgctgtgttgtgctttagtgcctgtataaatggcagtaaataggttctacacagcttgcttagaaatcggatataaatgactttttagatgtctctatgattgaacagcaatctagatatgtgcttctctacctttctttaggttgtaaagaaagcagcctaatagatgcttagggaaggaattctggtcagttgtgggaaataatcaccactgggccagcattctgcattatagactaacatagcttcagcttgaaatctgatattttaatacacctctgattggaattagcaattacctgtgttattttctttttgtgacccccagtttcccatagttttagtggtggtatgactggcaacattgttaacaacaaatagacccatgccagactgaaaataacttgaaggatttcataaattttctttttgcatactattcatggaaataatctactctgcacttccctatgaatggatcatgatgcaaggctgtccaaaaaaaagaaaaatatttctttatgaatcaagtctcaaggctgatagtataaaagacttatggaaatggaatttgcatatttttaaagtaattttactgagctcacatatcaagaatatgaaatcatgagatagagataagttctctcaattctcattagaattggttggaattaattccagattattttcctgggagattttattttaagatgtgaatgttacaaccattacagttacctgtaaggcttgagatctgcatccccaaagtatgttcctttgttagtgttagttatttgagattcacagaaaatgcccagtagcaacagtctgtgctgtctttcagaaaaaaaaaaaaaaagcggccgc

SEQ ID NO: 1936 - protein, 58 aa, Homo sapien
LVHWFLLWSFYAWPFYQIIISVNLNLVYLSLKEAYRLGPYTSFLDMLKKKNVLGLLYP

SEQ ID NO: 1937 - DNA, 1380 bp, Homo sapien
tgtcgctcccatcctagaccaatctaattgcaagtatctcacagggagcccaagtatcaatgtttttttgaacagctttatggaggtataatctatataccataaaatccacttattttaatatatgattttagtaaatttaaagacttgtgcagcccttaccacatcatacaaaccagaatgtttccatcacccaaaaagaaacttcatgtctatttagtcactccctgtttctactcccagctctaggtggccattaatctgagtatctctagatttgtcttttctagacctaaacatcaggtttttgtttttctgcagccagagttgagaaccataattctaaatgcattatgagaaataatggtttttaaagattatatataatattttacgtattttcatatttatgactcccatccttacagtgaatgcgtctatcaccagtaagacaaagatcattaatttgataatggaacttaacagaccattctttccttttatacattttagtatcatattcaaaatggcctcccattctgtccccaagttattttaaaacatctccagtcttgcttttttcccctttagctcataaatgaatagtgctggaagatatctcaggagcattctccctgagatgatgtcttcagtaatgatcgcacgtattggtgttgattccatccttgaagttactttcctttatctttcacagtggtgtttcttcactagaggttttgctgtctgattaacttctctgccaaataaatggacttttgcttcataggtacacaaacatttctaaaactttttttggaaaatatatttctttcttaaaaaaacaaatagtgcatgcacatttttaaaaaaataaataaaaaataatctaccccaaaatgaccagttaagatttactttcagacaactctgtgcatatttacatatgcttatatacaactatgtacacctttgcatagatgagatcacactctatgtactgctttgtaacttgcttctttcacttaatcctgagaacatttgtacatgaccatagatatagatttgtattgtttttaatggctgtatagttttgcattatactgaatcttgatgtttaagagctatgtatattgaggacattatttctttgtcttgtgttgcaaattttttaccatgttattattagtcttttaaccttatttatagtttttttgttataaaagttaagttttatgatgtaaacttaatctctttgattttataattcctggttttcccgacgtgcgtagaatgaccttccccacaaggtaataaaaatacctccatgattttgcttaaaacttttatgctttatattaaatctttgttacatcttgaaaa

SEQ ID NO: 1938 - protein, 29 aa, Homo sapien
VAPILDQSNCKYLTGSPSINVFLNSFMEV

SEQ ID NO: 1939 - DNA, 982 bp, Homo sapien
aaataattaaatataaataaaaataaagcaaaatctgttgggaaacgagaaaaaggagaggaatttttcaggaataatcataaaaagaaatgatcatcagactgaaagtccagagcctgagaaatgaaaacatatttttaagcattggtgttgaccatgcagacaaacttttgttaattcagagcgatacaaaaggcactttgaatctataaaacttgaaaaagttaaaaattgtatgtcggataaagctttaagtcatctgtcactattaacctcagtgcagcaattctgactcctgtgcctggattccttttatgataattttgccacctacaggacagattaggtgctggtcgcctgaattattttgtgttctgaattattttgagctctaaaatggtaaagtacaaatactcattgttttactgtgcctttggccttttataaaaaggtatttataattcgttgataaaaaccaatatttgaagctgttgattaccaacaaaaaagtttcactctctttatagtgcttcaggatacaactttttcagggccttattagagaaaaactgattcacatgttattcttctaaagctaaattattaaaatgtaggttgaaagattggattgattgtgaatctacactaaagatatggttccaggcagacctccttagagacctccaggcagacctccttactgtcttcagtgatgtttaatttcattactgttactgggtgccaagtgtctttcatttggaagtgaacttactccagttattgaatgtttatcatatcataatttgcatttttccaacattgaaggtattttaaaaagtcactaagagattcattcttttattattcaactacaaaaaaatagtgtaatgatcagaatttaaaatgtgtgattctttttcttctgtaagtatgtattgctatgataaataaaaaatggcaggaccattgtttttattaaaat

SEQ ID NO: 1940 - protein, 8 aa, Homo sapien
MAGPLFLL

SEQ ID NO: 1941 - DNA, 957 bp, Homo sapien
gggagagaggataaatagcagcgtggcttccctggctcctctctgcatccttcccgaccttcccagcaatatgcatcttgcacgtctggtcggctcctgctccctccttctgctactgggggccctgtctggatgggcggccagcgatgaccccattgagaaggtcattgaagggatcaaccgagggctgagcaatgcagagagagaggtgggcaaggccctggatggcatcaacagtggaatcacgcatgccggaagggaagtggagaaggttttcaacggacttagcaacatggggagccacaccggcaaggagttggacaaaggcgtccaggggctcaaccacggcatggacaaggttgcccatgagatcaaccatggtattggacaagcaggaaaggaagcagagaagcttggccatggggtcaacaacgctgctggacaggccgggaaggaagcagacaaagcggtccaagggttccacactggggtccaccaggctgggaaggaagcagagaaacttggccaaggggtcaaccatgctgctgaccaggctggaaaggaagtggagaagcttggccaaggtgcccaccatgctgctggccaggccgggaaggagctgcagaatgctcataatggggtcaaccaagccagcaaggaggccaaccagctgctgaatggcaaccatcaaagcggatcttccagccatcaaggaggggccacaaccacgccgttagcctctggggcctcagtcaacacgcctttcatcaaccttcccgccctgtggaggagcgtcgccaacatcatgccctaaactggcatccggccttgctgggagaataatgtcgccgttgtcacatcagctgacatgacctggaggggttgggggtgggggacaggtttctgaaatccctgaagggggttgtactgggatttgtgaataaacttgatacacca

SEQ ID NO: 1942 - protein, 247 aa, Homo sapien
MHLARLVGSCSLLLLLGALSGWAASDDPIEKVIEGINRGLSNAEREVGKALDGINSGITHAGREVEKVFNGLSNMGSHTGKELDKGVQGLNHGMDKVAHEINHGIGQAGKEAEKLGHGVNNAAGQAGKEADKAVQGFHTGVHQAGKEAEKLGQGVNHAADQAGKEVEKLGQGAHHAAGQAGKELQNAHNGVNQASKEANQLLNGNHQSGSSSHQGGATTTPLASGASVNTPFINLPALWRSVANIMP

SEQ ID NO: 1943 - DNA, 2410 bp, Homo sapien
tcttcacccaaggcttgacagcccacagagtggtctcatttgaaattacaggaaattagagcttttgcttgcagttctgccttcctggcctgtgtttaaatgctgtcacttgtttatgccaagttcaaggctgattcaatggttggtcccctcacccagaaaaccctgaaggggaggatacagctctgaaggggggcagcagtactaaaaacccaagatgccagtggtatagtgggcacaagggatggcgaccatgaggatgccaggcatcatcaccaatatctatcctagagccagtataaggccagatgcctacttcccacagcctccccgggttccaaagtcatgtcattgttttcagtggaaacatatcgtttgttgcatatcttcttaaatccatcttccttgtaagggctttagaactaaaacttacttatattgtttttccttaacagagggagaaaaatagtggattattatttctaaaataaaaggatgttctgctttctaaatatcccatcaaaatcttcagttttgcacttttttgatggaaaattcatcttatcttcctatgactttggttttagcctttctgaatttgttaccccttctggatggcttatttgatatactggaatagttaacaagctatacttcagcatatgcactatattctaacaaattttttttaataaaatcaagacatcagcaagaatgacatttacgtgacctcataatgtgggattatggccttctgttgctattccagtttgatatggaagcatctatatcctctattgccattagatgtgttgcttttcagaaaagtaacgaaaaggtcattttaacggaatccaagaaacgatgtcatccaaatattgacagtttctacatttcatgccatctttataactcaattgaaagttgccgtcattcttgtgaagtatttgacaagtgcaatctgctagaagctcgtttttcttgtgactcccaaatgttagtgctacttagcctcagtaatgagttacagttgaaaaaaacatgagggaaacagagggacagagattttctaatgaacaatgatggaagagacctaatgtccttgctagaaacagccaggatggaaattatccagccctggcattctccttatcatcaatgacagtcattttattcatttatttcaaatgtgggtgggctagaagtggaaggagggaattctctctgcctaaaaattctagaagaatgaaagtaatctttgtatccaggaaactaagagaatgaggaataaatatcttcagcccgactcctgaatttgtttattcttccatctataattagattgtgttttcatttttgctttgtcatgctttttggttgttatttggctatacagttttatgctttaaaacaaatgataaagttaatttccaattcaatagtgaaatattaacaatctaactatagccagatcaaagacacctgaacacagaaaacctttatttgctggtgctgccattgcacaggctgtacaatgaaatagatttgaaaagctgattgattttcctgcacataaattctggatgtcaatttccaaccaaactccaatccagctatgtggcatgaagagttacaggagggagggaggaaaatagccctatattagtcatgtttgcatacagaggatcaaagtaggccttcaccataatagttctaattaaaatggtccttgctgtaggagagacaaaggggcttttcctctagctggtaactattcagatgatggacaagtcttctttcataaaagattacaaagaaggcatccgaatcactgtctgtgatactgggtcacatattaatcactgcagctaattgtaaatctttctatgaaacactgaaaagcctctttgtgaattaatacagttctgcttgatgcacttgatttgaaaagacatttctctgtatgtggcgcatgtcggctttgctttgaaaaataacaaagttagcagaatatgttcaatatattttcttggggaatagggtttttattacatgattcattaaggatttgccttaccctgacatttgtgatataaaggaaaatcagaaaaaaagtaattttcttgatcaagatatgtttttacttaatgcaaataaatgtagtctgttgcttgcaaggaaaaaaaaatggcttctgatatctggtataaactgctaaataggataatacgtgcctcttttgttaaaccggcatttaaatgctggactgcttctaaatctgtttgtttcttttcatctgtgccatacactaaaaaacaactgttgccttcatactatatttgttagagcagaatacaaataaaatttgtttgagaggataatgtgaaaattataattaaaagggcggccg

SEQ ID NO: 1944 - protein, 102 aa, Homo sapien [sequence omitted]

SEQ ID NO: 1945 - DNA, 2263 bp, Homo sapien
  Unsure 535-730: Unknown base
gcttccctcagagtgagtatcccaagagatcacagtcaaagtgcatagcatttatataatctaatcttggaagtcacaaaatgtcattcttgtgatactctcattggtgaagaagtcataaaatcctgctcaggttcaaaaagagggtgtatagaacccaacactcaataggaagattgtcagagttacattgtaagaagagcatgtagttgggagatatcattgtggccattttgggaaagatgtaacatgtcacaatgtcatgttctccatcgtctccccgttccaccttgtactggtttccaagggtagtcgtttaaaagtaccacaaaaactgggtggcttggaacaacagaaatttattgtttcacagttctggaggccagaagttcaaaatgaagtgttggcagaaacatgctgcctctaaagggactgggaaaggatctgttccaggcttccctatcttctggttgttccttgccttctggctgcgtaactctagtcttcatttggtgttctccctgcatgcatggcnnnnnnnnnnnnnnnnnnnnnnnnnnnnnnnnnnnnnnnnnnnnnnnnnnnnnnnnnnnnnnnnnnnnnnnnnnnnnnnnnnnnnnnnnnnnnnnnnnnnnnnnnnnnnnnnnnnnnnnnnnnnnnnnnnnnnnnnnnnnnnnnnnnnnnnnnnnnnnnnnnnnnnnnnnnnnnnnnnnnnnnnnnnnnnnnnnnncatctctacccaacctctgtaggttccctcaatccaccaaaattttttggctccactggattatctagcagttaggaaaccaagatcattaaatgaattcaccgcaactacagtgagactgactaccttagcttacctctgtgaaaggagttaagccaaaggaatctgtggaattttggagagtttgggagcatttgggggcaggaggcaaatgttcttcctttaaatcacaacacttagttctcttccatttataagactcacccctccatcccaacccctgcaccacaggacaaggaagtgttcttggtcttcaactttcatccctgatggtgaaagcagttgctcctgacctatttgcccaccagcttctcctctggagcctgaggcttctgatgcctgcctggctggttctcagtaagaaggtcaagttcaaccagaggggagatgctgatgcctttcagtacttaaatatgagttcagaccctggggcctggacataagatttggggtcccctggatataagatttctgaaaacactcagactgtggagacccctgctgagggagaagctccaaactgtggcttcaggggaatgcaccaaggctctcattgaggccaccttttccaacaagctcccctcctgcttccccatggctggcatggctgaggaaaaaggacactgagcacagcccgtgcatgagcggcttgccatgcaacaggataaaacccataatgccactcagcaagccttggttgtaaatctagtttgattacatttgtaatcaaatgatggccatttgttctgtttctggtttgtgaaccaactgaagacataagcagggcctcagctaacccacaaatagcacatgtgtgcaaactggaaaaatgaacccttcttctgggaggacgccagcccaggccaggtcacccggcttggccagcagaacacagagtggattttggtcccgtttgttccccagtggggtatctatccttgtgcagggcacaagcctacatggtggctctggtcatatcattagaaaatagacagaaatgggctgcacaccagaatgaatgaattgaattgaaagggaggagtgatggtggaaaaaaaaacaagtcaattcatttagactggtagaaccagaaccactgtgtagtacatccaaacggttaaaattccctggaagatgttacataatcctatcatggtgtttatttatggaaatctattttaaaaattttatgtaatactgcacagtctgtttgcatgatgccttgtacgtagtagcaactcagtaaatactttttgaatgaactagtatagtattttaattagctagtcttcatgtactggtacaaaagaacagtgtcatcttacagctgaagtcatagaggggaaatatcccactcaagatcatataacattccaggtactcaggatgaatggtttgaggactggtctgaattcttcaaaggtttcagctgtattaacattctccatctaataaactttatcttgtcattgc

SEQ ID NO: 1946 - protein, 127 aa, Homo sapien
  unsure 41-106: unknown amino acid
  Unsure 535-730: Unknown amino acid
MLPLKGLGKDLFQASLSSGCSLPSGCVTLVFIWCSPCMHGXXXXXXXXXXXXXXXXXXXXXXXXXXXXXXXXXXXXXXXXXXXXXXXXXXXXXXXXXXXXXXXXXXSLPNLCRFPQSTKIFWLHWII

SEQ ID NO: 1947 - DNA, 3564 bp, Homo sapien
gctggacacggagaacaagcggctgcgggccgaactgcaggcacttcaaaaaaacgtatcagaagatacttcgagaaaaagaaagtgctttagaagcgaaataccaagcaatggagagagcagcaacatttgaacatgacagagataaagttaaaaggcaattcaagatttttagggagaccaaagaaaatgaaattcaggacttactgagggccaagagggagttggagagcaaacttcagaggctacaggctcagggtatccaagtatttgatcctggggagtctgattcagatgacaactgtacagatgtcactgccttttattggaagactgtgaagaagcttttctgaaaaaccctgaaggaaaacctcgattaatctttcatcgtttggaagatggaaaagtcagttctgactctgtccagcaattgattgatcaagtttctaatctaaacaagaccagcaaagccaagatcattgatcactcaggagatcctgcagaaggagtatataaaacttatatttgtgtagaaaagattattaaacaggacatactgggttttgagaacacagacttggagactaaggatttgggcagtgaggattccattccagaagaagatgattttggtgatgttctgtgggacatacatgatgaacaagagcaaatggaaacttttcagcaggcttctaattcagcccatgagttgggatttgagaaatattaccaacgccttaatgatctagtggcagcacctgccccgtattccacctcttctcgtgtctggaggactaggttctgggaagtctcttcttttatcaaagtggattcaattacaacagaagaattcccccaacacactgattctttcccattttgtgggaaggcccatgtcaaccagctcagagtcctccttgattattaaacgactaactctaaagttgatgcagcactcttggtcagtctctgctctgacactggatcctgctaagcttctggaagaatttccacgttggctggaaaaactctctgctcgtcatcaaggcagcatcatcatcgttattgattctatagatcaagttcagcaagttgaaaaacacatgaaatggctgatagatccactgccagtgaatgtaagagtaattgtttctgtgaatgtagaaacatgccctccagcatggaggttgtggcctacacttcatcttgatcccttaagtccaaaagatgcaaaatctattataattgcagaatgccactctgtagacattaaattgagtaaagagcaggagaagaagctagaacgacactgtcgttctgctacaacctgcaatgccctttatgtcacccttttcggcaaaatgatcgcgcgtgctgggagagcaggcaatttagataaaatccttcatcagtgtttccagtgtcaagatactctttcattatatagacttgttctgcactctatccgggagtccatggcaaatgatgtggataaagagctaatgaagcagatcctctgccttgtcaatgttagtcacaatggtgtgagtgaatcagaactgatggaactctatcctgagatgtcctggactttcttgacctcccttattcacagtttatacaaaatgtgtttgttgacttatggatgtggcttgcttaggtttcaacatctgcaggcttgggaaacagtgagattggagtacctggaaggccccactgttacttcttcatacaggcaaaagctaatcaactatttcaccttgcagctaagtcaggacagagtgacttggagaagtgcagatgaactcccgtggctttttcagcagcagggaagtaaacagaagctgcatgattgccttcttaatctctttgtgtctcaaaacctttataaaaggggacactttgctgagttgctgagttattggcagtttgttggcaaagacaaaagtgcaatggcaacagaatacttcgattcattgaagcagtatgagaaaaactgcgaaggcgaggacaacatgagttgcttagctgatctttatgaaaccttggggcgatttctcaaggatctaggccttctcagtcaggccatagtacctttgcagaggtctttagagattcgagaaacagctttagatcccgatcacccaagagtagcccagtccctccaccaactagcaagtgtatacgtgcagtggaagaagtttggcaatgcagaacaactgtataaacaggcgttggaaatctcagaaaatgcttatggtgcggaccatccatatactgctcgtgaacttgaagcacttgcaactttgtaccagaaacaaaataaatatgaacaagctgaacattttaggaaaaaatcctttaaaattcatcagaaagctataaagaaaaaaggcaacttgtacggatttgcccttttacgtagacgggctttacagttagaagagcttacattaggtaaggacacacctgataatgctcggaccctcaatgaactgggtgttctctactatcttcaaaataacctggaaacagctgaccagtttctgaagcgttccttagaaatgagggagcgagttctaggaccagatcaccctgactgtgctcagtctttgaataatctggcagctctatgcaatgaaaagaaacagtatgataaagcagaagaactttatgaaagagctttagatattcggagacgtgcattagctcctgatcacccttctttggcatatacggtgaagcatcttgccatcttgtataagaaaatggggaaacttgacaaagctgtacctttgtatgaattggctgttgaaattcgacagaaatcttttggcccaaagcaccctagtgtagctactgccttggtgaacttagctgttctttatagccaaatgaaaaaacacgttgaagctttgccattatatgaaagagcattaaagatttatgaagatagcctgggtcggatgcatcctcgagttggagaaacactgaaaaatttagctgtgcttagctatgaaggaggagattttgaaaaagctgctgaattatacaaaagggcaatggaaataaaagaagcagaaacatcactcttgggtggaaaagctccttcacgccattcatcaagtggagacacgtttagcttaaaaacagctcattctcctaatgttttccttcagcaaggacaaaggtaatagcagcagttagaattctttgcaaatgtaccttaagacaaaataattaaacatttggaacatttgaatttgaaactttaaaaaaatgttgtacgaaattttactacgtgtgatttaactgctatttgtatgaagttgtattggattacattaagttggaattgtgattatgtctgttttagttgtttaaaagaattttcctattatatggtatccaaggatgtagacacattagaattataagaagacatgaggagcaaatcatgaagagcggattggtctttgttcaacaagagctggcagagtagttaagacaaggagttcaaaaattccatgaatcttggccaggcatggtggctcatgcctgtaa

SEQ ID NO: 1948 - protein, 748 aa, Homo sapien
MQHSWSVSALTLDPAKLLEEFPRWLEKLSARHQGSIIIVIDSIDQVQQVEKHMKWLIDPLPVNVRVIVSVNVETCPPAWRLWPTLHLDPLSPKDAKSIIIAECHSVDIKLSKEQEKKLERHCRSATTCNALYVTLFGKMIARAGRAGNLDKILHQCFQCQDTLSLYRLVLHSIRESMANDVDKELMKQILCLVNVSHNGVSESELMELYPEMSWTFLTSLIHSLYKMCLLTYGCGLLRFQHLQAWETVRLEYLEGPTVTSSYRQKLINYFTLQLSQDRVTWRSADELPWLFQQQGSKQKLHDCLLNLFVSQNLYKRGHFAELLSYWQFVGKDKSAMATEYFDSLKQYEKNCEGEDNMSCLADLYETLGRFLKDLGLLSQAIVPLQRSLEIRETALDPDHPRVAQSLHQLASVYVQWKKFGNAEQLYKQALEISENAYGADHPYTARELEALATLYQKQNKYEQAEHFRKKSFKIHQKAIKKKGNLYGFALLRRRALQLEELTLGKDTPDNARTLNELGVLYYLQNNLETADQFLKRSLEMRERVLGPDHPDCAQSLNNLAALCNEKKQYDKAEELYERALDIRRRALAPDHPSLAYTVKHLAILYKKMGKLDKAVPLYELAVEIRQKSFGPKHPSVATALVNLAVLYSQMKKHVEALPLYERALKIYEDSLGRMHPRVGETLKNLAVLSYEGGDFEKAAELYKRAMEIKEAETSLLGGKAPSRHSSSGDTFSLKTAHSPNVFLQQGQR

SEQ ID NO: 1949 - DNA, 1568 bp, Homo sapien
  Unsure 104, 112: Unknown base
cattagatttcacttttttaaaaaacccagtggacattgctataaataagatttatttggctacaaataacctgggatgttgcttattatgattgatgcctgcnggtttgtncccaagctgagtgaaattgaacctcgtcctccctactcattttgatgactgaggctggtttataagaaaaggaagtttggagaagaaaaccgagattagaaaatatcatgttttggttggagataagaaccagggatggcaagtaccagtgtgtacaaatgtatttcacggagtttgaaggaacgcataatcaagagggaaaacaatttgtccttcattggacgtattatttggatttgggtgagcaacaaaatggaatgtggtctgttaggagcattctgtttgttcttttgtccctgatgtgatgaatcattgccacatgctagatggactcttcatatccaggttttgtccctcagggctgagcactgtattaaagagtttttgttgagtcatttaaccttagtgtccacatccagatcagctgtaaaatggggaagacgtgtgctgatttggaatgaatgcaaaatatcactatcattttcctaattacagaggagcaaaggttatcttcagccctttcagttctatgctcacatattcaaatatcaaatgtaatttagctgaagttatttaataatcaagtctttcaatatctgttcaaagaaaaagaacacactttgaaaattctgcaaagctgtctcccagtctttaaaatgtctggaagcactctccttctttacaataccaacatcactggcccagaatcttccctgtgctaggttgtaaatataaataaattacttgttttgtaaacttttgtaaagaatattttggtagaaatacttcaaacatattctttgggttatatttatacatatgtgaaataaatatactatcaaaaggttatattttatacaaaaagtaaattgctaccttttgtatgctaatatgcaaagttttgtataatatgatggtttatttttagctctacacttaaaccataggtggttgagtgggaacttttgaaaactatcaagaggcttgttagacaaatttatattctgaaacctcaataagaaagcattccaggtttcaatccttgttttttgtcctgctcccaaattcttttttaaacccatagttcttgtgtcttatttgattcttctgctgtgcacattgtattggtccttgttgcatgtagtctactgtgtgttttccgattttataaggcagcatttctccatacaaaaaraaaaaaaatgatgtacatataaacgcttttrttgtatggctcctccatgttactgtatatatctgccagcacttcccagttacactcctgtgagtcagcttatttttaccctaacataaatagtatgttttgtagtagttatcaaatttaagagataaagcaatcagaatgtttggattttcttctatcttaatgtgaatttcataattaatgtctatttattcagctattcattaaaatacaggattctttggggaaaaa

SEQ ID NO: 1950 - DNA, 1831 bp, Homo sapien
gtagggaagaggaattttattttggaattatttctaagttgaacagaccagaattaattgtgaaaacatgatctgttggtttataattggacacgcatttggagatactggctcatcatactacctaggagcaaaatctctgaagtttgaatccctgctcttccacttgttagctgtgtcatcttgagcaagtaacatccttcagagctcaaatttcttcttgtgtaaaaataggaacatctatctcttagacttgttctgaagatgcgccttactttgtatctggaacaaggataagtatcttctgtatcctgctctcagctgtcactgctttttaggccatcattacttgcttggcatactgcagtgcctcctaattgtctctttgtttctgctctggcctctctcatgtatcccccacatggccgctggttctcttttctttatggggtctttgtaatgtaatctctcctcctctagcctccccatgcccctcatttctccagtgtgctgtgctgtattaccaggtagcagaacgtaccctaatatcgcatgccttcctctgacctaacttttccatctgaccaattcctacttatctacaaggctcagtccaaggaaaactgataccgggaataatcataacaattgtgcacgcctcctcagctgctatgacaccttgccattatttcatccggatacttatcaagctacttgtaatgatctgtagtcttatttggactactagattgtgagctgtaatacaagtattttgtctctagtattaagccagtttatttggtttctatcattaaatacaatgttgaaaaaattctcagggtccaaggggagatgcttgggttgagtcagagataaagtaggaatatgcagttgaggaaggtaaggaagataatttagctgaagtaaaggaaaagtgcatagtgtgttcatagagtgggagttaagtgtaagagacattctagggaagtgaaggagaagctgaaagagcaagtagagacggtaaggtgaagctcctcttgccatgtgaaagagatcaaactttctccttaatttatgggaggagcgagcatagagaagtctgtgatgtctcacaaggttctcacttttacaattgaatatagaagtagctcttaggagaagcagaacgttcagaggggaagatgaatatggttttgggtacattgccttaaattgcatttttggtatttgggtggcgatgtctagtaagtaaaaagccaggaatgtgattttagagcttagagctagaagcaaggaactaggagttgtttagatgatgaaaactgaaatatgtatatgaatgggaatttttagaatataaagggagagaatgaaactaaggagcaaatgttagggaatcctaagaaatattaaagaattgggaaaagaggaacctggaaggtagagtagtaaacaggaaagggaggaaaaacaggaggtggtaataaagtagtgttaatgaatccaagagggagcagtcaccatcttcaaatgtgatattgaaattagctgggatgtccagttgtttaatccattaaattgtggaaacagtctttctagtgcttaattataggaatcattgatcatattaataaactttcagttgaagcatcagcagataattattccaaaaccctctggcaaagaaatgtagatgcttttatagtctaccattgaacacagttttacatgacacttggcaaaacttggagatggatggcactattttgtaagagaatatgaaacactgctttgaagttgtcattaaaggatcttatcaggtgctttttct

SEQ ID NO: 1951 - protein, 17 aa, Homo sapien
MKHCFEVVIKGSYQVLF

SEQ ID NO: 1952 - DNA, 1678 bp, Homo sapien
  Unsure 215-271, 1362-1390: Unknown base
aaaattttatgtgtttatagagagatgctaactgtcagcatatagtatttatattggggcaagaagggttaaatcaaatctttaatttaagtaagcatagttcctttaaagatcagtagtatttatactctgaaaagagtaccaagcttagttcagttatttattcatccattttttttctattgtttctcctctggggggaaatggtgttttgnnnnnnnnnnnnnnnnnnnnnnnnnnnnnnnnnnnnnnnnnnnnnnnnnnnnnnnnngtcattcagattcactaaatttggggatggttttattaaagtatattaacttctttttaaccaaagctttctgaatatgaccagcctcaggtgctagcgcattaaagagcaactaaacctaattccagtgtcgatttgtgaaataataaaagctaattgaatttctctaagggtgagagagaacataatgatgaacttaaaaagaaattccttttcccagaagggattctgcatgtacctacaaacaatcatgctctaaccacagtaatagtcatgccatggtgacattgcttttacggtaaaccaagataggtaatatgatgcttcttcccaggtgtttctgaaagaaaagcagcggtggagcttaagagccaagtccactgatgacataataggatggaattgtagacagagacatgctccatgaaacaaggaaacaactgactactatttggatctaagttgggatctgatgttaaacaataaattcagtttaaaaaaaatatggagctcagaaaaggatgtgaaaaacttgcattttcctttcttcattattacaaaaacacctatgtgatgacataaaatacttgggtgatatcagaacaattatccttaatagtttttataattaaagtttcctaaacttcagtctccaatagtcttttaaggattggaaccacatcactgtcagccccgctgctacaatgcctttgtacaatttttttacataaggcaaataaggcttttgtacaaagcctgaataccttctgttccaatggtgtccaaatggttattatattgtgaaaaacctggccttggtcacaatgcaaacaaaagtacagatgaaagtgctttttggacagtttgcaaattgtgttaaagctacggatttttttttaaagtgttcagcatcttaacgtgtattaaagctatggatttttttttaaagtcttcagcatcctaattcaccctttctaacttaagaaaaacatgacttaagacactgcttctaagtttggttgttctttatagtgtggatacccagttatctgtgagcgtatgggggtgggctgagggtcaggtgaggaagnnnnnnnnnnnnnnnnnnnnnnnnnnnnnatttgcatgtgtatgatgtgtgtgcgtcggaccgcttctaggctactaagtgtcaatggaaaagaaaatgtattcaaaatacttaaatcaaaactagaagatggggaaaaaaagatttattctatacaaagccttgtctggaccactttagagagacttctatttttttaacccttctataaatatttgatggcacttgaaatattcctgcaataaaatgtgatttgtgtaaagaaaaaaagattttgtaatgtgaaacaaagaaagaaagtatatgtaatttttcta

SEQ ID NO: 1953 - protein, 14 aa, Homo sapien
  Unsure 215-271, 1362-1390: Unknown amino acid
KILCVYREMLTVSI

SEQ ID NO: 1954 - DNA, 661 bp, Homo sapien
ggtactggatcaaacatgtatagctggacttttcctgaggaaaaaagttgacctgaccagtgtatgaaattcaaacactgtataggaacaaggtaaaagcacaggtaggaattgctgaataattacctttagaccagcctgaacaggagacttcccacgagggtgagctcatttaatggttcctaaaactcaatcttgtggatgtcagtggtcatgcttgattatttgcagcagtgttttatgaaaagcagtagaaatgcattgggaggctgcagagaaagaggacaataacgggttttacttttgtaaatgaaatcccttcggtatgagacaagtatgttttttgctgctctgcctaagccactgaaaagggagatgtatgtggatgttagtgtgtgagtatgtgtgtactgttcatgtaggcacatctaaaaactgctgtgcactatggctgatgaccaacaagagacctaaaataaaaagagaaaaaagatgctcattggctttggaaaggaagcaattataaatacagtttaaaagattaacctattttccatttctccactcacctattttcaagaaatgtaataaaacaccaagctctttaccatatgtttacaacatttctaagtaaatataagtcttttaaatgacagacaaa

SEQ ID NO: 1955 - protein, 21 aa, Homo sapien
VLDQTCIAGLFLRKKVDLTSV

SEQ ID NO: 1956 - DNA, 2972 bp, Homo sapien
  Unsure 1761-1825, 2124-2170, 2793-2872: Unknown base
cgcttgtcctcttaagacaactcctgtggcaccgtttctccctccacagggccaaagccatagtgtccggtcccaaggacaaaggctcttcctagtgctaggagaggtatgagcagcctctcacctgtgatccccacagctcacaggtgagaggctgctcatacctgtgagctgtggggatcacaaggctgcctgcctcagtcttggagtcctgttgggtgaatgaggcagatgggaaagagcctcaccagcagctgcttttggagcaggggtccaaggaagagagggtggcctcgacatcaaactgcctggatttttctaccaccctgttacatcataacaacttctgaaacacacaccagccctgagttctgggctcatttgaagcctggaatagcaataaatctttttaacttgcggacagtttccccttgccttggctgcatatttcactgatcacatctcaggatttcaaaagcatttttggggtggggcttttttggttggaagggtttgttggaacggtacaggtgagccgaggtgattccagggacggacccttctgcaggagcttgagcttgcttgttgtctctgcttcatcgccatccagctcccttgtttgctgttttgctttccatcacatcatgactgcggagagcaaaaatcacctagtgaccattgaacaggtcccagagacaaaatctttttatctgaggaatttaaaagggagcaaagaccacctggtgactatcaggccatgcagaggcaaaacgccttatttggggaaaattaaaagtaattagactttcctattatctaaagcaggcatctggttccagatttcttttccccgaaaaaaaccttagaagtaactaaaatttctgtacatctccggaatgccatgctgaaactcactgcaaccccacggtcccgctttaaggtccataaatatccctaaggaaaaatccaccgtggtacattcagtcctctcaccgaggtgccccatggcagtcttctgcagcattcttctaatacctttcctttttcaaacctatactgttgttggtgaattctttttaccaacccacgagttgaccacttcccaatgccggggatctgacacctcacctggcaatgacctccacagccgtttccctctgttggatcttccagccttattctcaacagttcatttttagttcacattcttgaccgaatctcagtagctcagttaatctttttatgtctgctctgctcttgggtcatatgttccgtgaggtttcttaggggtgggggatgaggagttaaaggtggcatcttcaatcgcaggtcaaagcagactttaataaatggtgctgagccaactggaaagccccttggagaaagttgaagttagacctgtacttcacaccatatgcgaagaatgaactccatctggatccaggatccaaatgtaagaaaatgaagccatataaatacagaaggaaacgtggtggaaatatccagtggcaacaaaatattgacacatttgactacatgaagataataaaaatgcttagtaaaaacacaataaaatcaaatgactgggagaaaaatttatccagcctatataatagacaaacagttagtgttcttactatataaggaattaaaaattaagggacaaaggaccaaaaacttgatagaaaaactgggaaaagacatgaacatactcacgtaaagatataaaaatggctctttaaaatgaaatattcaaactannnnnnnnnnnnnnnnnnnnnnnnnnnnnnnnnnnnnnnnnnnnnnnnnnnnnnnnnnnnnnnnnaagaaagaacaacacatttctgttaggcaaggctatagggaaacacactgtcatcactgttggtaggaatgcaaactggtatgacttctggaggggaatttgtcagtacttaacaaattgcagaagcatttaccctttgacacaaccatttccactgtgggaatttccctgaagatgcacctccaacagtacaaacatacagatgcacaagattactcattgcagcactgagactgcaaatattggaagcaaagtcatgttcatatacacgagaaagcctgagtaaaccatggcaccannnnnnnnnnnnnnnnnnnnnnnnnnnnnnnnnnnnnnnnnnnnnnnggaagatctctatgaatcggtatagttattttcaagatatattaaatgcaaaaagcaaagtacaaaaagtagaaagtggtactttgtatgtaagaaagaaggagatgtaagaaagcacatgtatctatttgtttatgcaaagtaaataaggaaagattggccagaaagtaatgagctgtctatggatggtaggtgggtttagagtagaaagaagggagaaatcataacggtgtaaaggaggaagggatggaacactgccgagtgtatctgagtatattttgtataactgtgagtcttggagccatagtaatgtttctcatgccccccaaaataattaaagtcaaccaggatatgaggagagttcaaaatgaaatacaaacagtaacaaatgaacttaactgtatttcagatgcataatacaaccacattgaaggaggtgggcaagaaaaataagaagttatagcattttgatgggatactagaaagagaaaaggaactgtacacaaataccagagtctagttagcaaatttttcacagaagcagaagttagtaattcaggaagtattttatgtgtgtattaggatggggaaaacaaatatatggtaggtaatgagaacatggnnnnnnnnnnnnnnnnnnnnnnnnnnnnnnnnnnnnnnnnnnnnnnnnnnnnnnnnnnnnnnnnnnnnnnnnnnnnnnnntgacaataatgggttatagtccactgactaaaaatacactatagaatcccatacacaatggaatcacaaatgtagaaggaacgatagaaatagaaaaaat

SEQ ID NO: 1957 - protein, 36 aa, Homo sapien [sequence omitted]

SEQ ID NO: 1958 - DNA, 1870 bp, Homo sapien
  Unsure 940-1250: Unknown base
tagaatatgtttgagtctttgcagataaagaccacattggcttcagaagccagcatataggcatgctgcatttaaaagaagggaaattattatttcaatttaatatgagcagtcgctatcttctttttaagggatttgttctaatagcagttacggtttaagaagataatggaagtgttgctttaacttcataggggtctgtaagagtattctcccatactcaaggggaaggaagcagaactgttgttctttctataggctgaggttgagtaaatacaggttttttacaactcctaaagaagttctttagtaagtagtaaaatgaatattgtaaggtatttgaataatttcggtacatttcccttctttttgggtacttgtgattttcctcaatgcactagtgtgtatctatggaaatagagcgccagtgtcataaagtagcaggaaaatacatttttagtaagtctgttttacaagcttatactcatagacttggacttgagtaaatttggccctattaaatggcatagaatttgcctggccttaatgttagagtaagttacagtatagcatttaatagtttatttattttaatggatagcacatatatatattgtgttggaatttctttttatagtatgacacaggctatattaaaagactgcagttattgcttgctgtaggaattgttcatgttccgcaacattgtgtacatgtatataataacccttttcctgattaaaagaatagtacatggttattgtggttattcacagtgtgtaaaatacaactctattttaacacagaaagacaattcttaaccagcttgtattggttacactataacactttcttagtgttttagttagttccctccttttaatttttggccatttccttcaaccaacagcagggtcatcttgataataaagaatagttnnnnnnnnnnnnnnnnnnnnnnnnnnnnnnnnnnnnnnnnnnnnnnnnnnnnnnnnnnnnnnnnnnnnnnnnnnnnnnnnnnnnnnnnnnnnnnnnnnnnnnnnnnnnnnnnnnnnnnnnnnnnnnnnnnnnnnnnnnnnnnnnnnnnnnnnnnnnnnnnnnnnnnnnnnnnnnnnnnnnnnnnnnnnnnnnnnnnnnnnnnnnnnnnnnnnnnnnnnnnnnnnnnnnnnnnnnnnnnnnnnnnnnnnnnnnnnnnnnnnnnnnnnnnnnnnnnnnnnnnnnnnnnnnnnnnnnnnnnnnnnnnnnnnnnncctgttaaagcaggttgtgctgtgagaagaacttttctgcctggcttctgctttatagcctataagatagactggaggcctatttaagacttttgttaaaattcatgatacgagttgagttattaatctgcccatttaaaccgggcagtgtatttttaatggttattggatgcaggagccagattactgaggaaatggtaggattccttgactggacagctttaagaacaagtagtctagtgaaacagggcagataccacccattcccagcaatcttttttgtttgcaatttcaattcattttccaaattgtggatagttttatgaatttctttgagaaaaagttgaaattatttcataatgaagacgagtcagagagaaaaggattagcctagcatttgtcctctttatataaaggacttcttatagcctgattcctaatgcagagttcagtgaaagtgacatttatttggtaacagcttttgagaaatgttactttatttctaaataattatatacttggcagtttattcttccagttaagtttactaatagttactgatttgttaatataagtttgtaagttgtttttgaaagttaaaatgaagctgggtgtggtgg

SEQ ID NO: 1959 - protein, 73 aa, Homo sapien
  Unsure 940-1250: Unknown amino acid
MIRVELLICPFKPGSVFLMVIGCRSQITEEMVGFLDWTALRTSSLVKQGRYHPFPAIFFVCNFNSFSKLWIVL

SEQ ID NO: 1960 - DNA, 1025 bp, Homo sapien
  unsure 76-100, 231-300, 374-679: unknown base
aaaaactctttctcttttaagatttccccacagggccccaaccacaattctctggcccccacaaaattttttggcnnnnnnnnnnnnnnnnnnnnnnnnncagacggaatcttgcactgtctcccacaaccatacatcattcataataaccaagagataattaacatacagtatacagaacccccattaatttttaggggtcctgcatatattctgtatgttaattagccnnnnnnnnnnnnnnnnnnnnnnnnnnnnnnnnnnnnnnnnnnnnnnnnnnnnnnnnnnnnnnnnnnnnnntgtatattatgaatattcaacctaatttgtacctaatttgtaatatggcaaatacgatctaaaaccacaacaannnnnnnnnnnnnnnnnnnnnnnnnnnnnnnnnnnnnnnnnnnnnnnnnnnnnnnnnnnnnnnnnnnnnnnnnnnnnnnnnnnnnnnnnnnnnnnnnnnnnnnnnnnnnnnnnnnnnnnnnnnnnnnnnnnnnnnnnnnnnnnnnnnnnnnnnnnnnnnnnnnnnnnnnnnnnnnnnnnnnnnnnnnnnnnnnnnnnnnnnnnnnnnnnnnnnnnnnnnnnnnnnnnnnnnnnnnnnnnnnnnnnnnnnnnnnnnnnnnnnnnnnnnnnnnnnnnnnnnnnnnnnnnnnnnnnnnnnnnnnnnnnncaaggtacatttaggcaaaaatataaagtctcacaatgccaattattggtcaagatatggaataacagaaactcatatactccttggaaggctaaattgatagaatcatcttgtggaaagtttgttattacctatcagcgtatggatccaatactctaagaagacctcataattttacacctaggtaaatattaatattttacaaacttcacatatgtccataaagaaacacaagtaaaaatacttatagcaaaaaactggaaataactaggtccactgataggaaaaataataaaaatggaatgacagtcctgttagaaaataacaacagcatgtttataaaaaa

SEQ ID NO: 1961 - protein, 75 aa, Homo sapien
  unsure 26-34: unknown amino acid
KNSFSFKISPQGPNHNSLAPTKFFGXXXXXXXXXDGILHCLPQPYIIHNNQEIINIQYTEPPLIFRGPAYILYVN

SEQ ID NO: 1962 - DNA, 2338 bp, Homo sapien
ggggatttctgtgtcctgacaccacctccccatccaccaccaaagtagccggggtgagccccaaaccttactgggtgtgctccacctgtgcctccaacccagcgaatctgacagcttcgacccaattctgcacacacccaggaagttctgccttttcttttctttcggtgtctcctgtacttcccaaaatttctcctcctcctgtgccctcttcgcccccctcctttgggggccccgtgaccctgaatgtggggggcacactatattccaccactttggagaccctgacccgcttcccagactctatgctgggggccatgtttagggccggcacccccatgccccccaacctcaattcccaaggaggcggccactacttcatcgaccgggatggcaaggccttccggcacatcctcaatttcctgaggctgggccgcctggacctgccccgtgggtacggagagacagcgctgctcagggcagaggctgacttctaccagatccggcccctcctggacgcgctgcgggaactggaggcctctcaggggacccctgcacccacagctgccctgctccacgcagatgtagatgtcagcccccgcctggtgcacttctctgctcgccggggaccccatcactatgagctgagctccgtccaggtggacaccttccgagccaaccttttctgcaccgactctgagtgtctaggtgctttgcgggcccgatttggtgtggccagtggggatagggcagaggggagcccacattttcatctggagtgggccccccgccccgtggaactccccgaggtggagtatgggagactggggctgcagccgctgtggactggggggccaggagagcggcgggaggtggtgggcaccccaagcttcctggaggaggtgctgcgggtggctctcgagcacggcttccgactagactctgtcttccccgaccccgaagacctgctcaactccaggtctctgcgctttgtccggcactgaggatgctgttctcagtttgactgtggggaggagagagaatggggtactagcacccctgaagcctctttccagctctgcttcaggagctatgagagtcgggactctcctgcacctgactggagctcagatgtgggcaggaattcccaaacctgagcccaccaaggactcacaagtggtccagaaggtctcaacctgtgctgaccctgggaggggtagggaaggttctctcagcttgttcttgcctaaggctgagcacctccagtctctccttgatttggagctcagtgtttaagggcttggaaaaggggggaacatctctttacccagactagacctagcaaaaccctggaaggatattgaggtctggggaaaagggaggactttgcattttcccaatgcggtctcttggaccatggcttctactcctgaagctgggtggcctggcctggcctgaccaatgagaggccagaacactctggaacatcggaagaggagttctttgctatgttccaagccatctactgagggaggcagaaaggccacaacccaccctaggttgatgtatgggagctaggacagtccccatggcaatggggctggagcatccctcatctggaagaatcccatactgatggcagggctggccagggggaagagggtagtatctgtgggtcctggcttttcttcatgtgtgcgtgcatatcagcccgtgtggctgactgatgtataggtccctggcatcctggttcatatctgtgttgctgactacagtgtctgtgatgtccgcatgtccaggcctgtttggggttgcctagcgactcttctggcacagggtgtgtctgtggtatacctgtgaggtggttgacaattagtagtttaatcacagggtgtgtgtgtgtgtgtgtgtgtgtgtgtgtgtgtttatgtgcacgcatgtatatgcatcaccacgtagccaggaggggcctgttggggtttgagtcactgggatcttcctggtgagaggtaagagaagtcactgggcttagctgggcctctgaggcctgtatggaactcttggttgctgaggcaaccatggacctgttgctaggagatagctggggaaggcccaaggccgcccagggcagagagaggagacgaagagtttgggacagtgggggaggagatgggaagggatgggatttctgggtcccagagcgggtgggatactcacgcacagcttcttcactggtggggggtggggcacacattatttctcactggtcatgatttacaagaagaaaaataaaactgcttttggacccccaaaaaaaaaaaaaaaaaaaaaaaaaaaa

SEQ ID NO: 1963 - DNA, 436 bp, Homo sapien
aactccttcaatttgtaaatctctggttaaatagaaaggtagcagatcagccctccttgatctctgccaacttaatatttgaacagagatttaaaggaaaaaatattacagaagtgggaatcctcaaaatactttctaaaactagctttgggctgggattataggcataagctactgcacccatctcagaatttgtctatgtttacaatattatcaatgggtagacagctaattgcacagaatataaatgaggagaggtagatttttattaatgtgtacattttccttaattcctgatttactcaggcccaggcttctttgtttctggtcttggatctatgggcctgtgtaaatctttgtcacttagctaaaaggatttcttgaaaatccttgtagttgtttattgagcatttactgtgtactaggcactattgta

SEQ ID NO: 1964 - protein, 53 aa, Homo sapien [sequence omitted]

SEQ ID NO: 1965 - DNA, 2118 bp, Homo sapien
gattcttgggttccgcgcgtagtttcggaaggagacatcgaagcagggcgaggcgcagagggcgttgcggactcatgccccagtcggcagtgcggggtcccaagccctgcagtgctacagctttgagcacacctactttggcccctttgacctcagggccatgaagctgcccagcatctcctgtcctcatgagtgctttgaggctatcctgtctctggacaccgggtatcgcgcgccggtgaccctggtgcggaagggctgctggaccgggcctcctgcgggccagacgcaatcgaacccggacgcgctgccgccagactactcggtggtgcgcggctgcacaactgacaaatgcaacgcccacctcatgactcatgacgccctccccaacctgagccaagcacccgacccgccgacgctcagcggcgccgagtgctacgcctgtatcggggtccaccaggatgactgcgctatcggcaggtcccgacgagtccagtgtcaccaggaccagaccgcctgcttccagggcagtggcagaatgacagttggcaatttctcagtccctgtgtacatcagaacctgccaccggccctcctgcaccaccgagggcaccaccagcccctggacagccatcgacctccagggctcctgctgtgaggggtacctctgcaacaggaaatccatgacccagcccttcaccagtgcttcagccaccacccctccccgagcactacaggtcctggccctgctcctcccagtcctcctgctggtggggctctcagcatagaccgcccctccaggatgctggggacagggctcacacacctcattcttgctgcttcagcccctatcacatagctcactggaaaatgatgttaaagtaagaattgcactcctgtccctctggccttccatctctcctgcccttgtgccccacaacctggccaacagtactggaagaaactggacacagtcaccagcatcccaggggagggcaaaacagccatgtcgtgccctgatgaagagcaattctgatcacagctgttactcactgagcaccagccaggcaccaggcaccccataacacggcttcctgtgctctccttccagagcctgtcgcagctctaggggggagctatacaatgatgtctttattagtgtcatcatgagaagcccaataagcagtatgccctaacagttagtaggccaggctctggagctaagctgcatgggttcacatcccagctccaccattcagcctgcagagaccatgagcgagttacttaagccaggctctggagctaagctgcatgggttcaaatcccagctccagcattcagcctacagagaccatgggtgagttacttaagccaggctctggagctaagctgcatgggttcaaatcccagctccaccattcagcctgcagagactgtgggtgagttacttgagctctctgtgccaatattttctcacctataaggtggaggtgaaaataaactctataacatgacaagaactacttcacagtagttgcagtgaggattcaacgagatgaacatttagtacttgggacacagcagtggcccagtataaatgggctacttgtcataagccctaagtcacaggtcaacaaactgagaggtaaaagcacttggttgagcttgtgtatctagtgagtatggattcagggaccagattcccagccccacgaactgctaagcaaccccacctcctaaacacatgagtgccgattaacttcacagaaaaacacacaaggcaaagttcagcgaggtgaaattctccaagctataaagatcagggaagacttcctggaggaattcacccttgagcaaaatcctaaaggatcaatagtagctggcaaaaagaagcaggaggaagcacattttaggtagaggagacagcctggacaaaggtctgagggaggaaggaacacaaggagtgcaggacactttcataactgcatgaacttcatagagatgggatcctttagcatgttctctgtgcacatgcttgaccatgttctttcacatgctttttgccacttgatctttccagcaactcagtgagagaagcaaaaaagtaagttgcatcctg

SEQ ID NO: 1966 - protein, 208 aa, Homo sapien
MKLPSISCPHECFEAILSLDTGYRAPVTLVRKGCWTGPPAGQTQSNPDALPPDYSVVRGCTTDKCNAHLMTHDALPNLSQAPDPPTLSGAECYACIGVHQDDCAIGRSRRVQCHQDQTACFQGSGRMTVGNFSVPVYIRTCHRPSCTTEGTTSPWTAIDLQGSCCEGYLCNRKSMTQPFTSASATTPPRALQVLALLLPVLLLVGLSA

SEQ ID NO: 1967 - DNA, 786 bp, Homo sapien
gggtctcagagatcctcctcattgcttccctctcccacccaacctaggggagtgggggtgtgcaatggtatttctgacccagacgggccaagcaggggagtcagaaaggggcccttgcctggtgttgcacagaagagggagaggatgttctgtgcctgagggtagaccaggaaggctgcctggaggagggagctgtatcctaaaggatgctcaggagctggcattgaggccagtggcatagcctgcacaaatacaggaggacctggggaggccaggggtggggctgggggtattgggtggggctggccgcattctccgtcttaaccagctcgctcctaggtgcttttgtggcttctgcactctaccagcttggagccaggggcctcattctctcttgcagtaaaatgaggctgatgactgagcctaggagttgctgggcatctggtctgctgattaccaccttggtgcccaatgtctgcctgcctatccactgctttcaaacaaggaggctgcctgacaccacccagggggacgcctcccacccttgcccagcctcagccaatctcctctttctcttcttcagagctggagttgtgccctcctatcctctctctgcccaccccatcactgctgtacaccctgccccttggcacttcggccccggacttgctcctcctggcaggcctgggtgcttgtgaagccgggtgccagagggcccagcacggcacggcctttgattctgttttctgtaaatcgacgacaataaattctctttttccttcatcc

SEQ ID NO: 1968 - protein, 104 aa, Homo sapien [sequence omitted]

SEQ ID NO: 1969 - DNA, 219 bp, Homo sapien
atgtcttatcaacagcagcagtgcaagcagccctgccagccacctcctgtgtgccccacgccaaagtgcccagagccatgtccacccccgaagtgccctgagccctgcccaccaccaaagtgtccacagccctgcccacctcagcagtgccagcagaaatatcctcctgtgacaccttccccaccctgccagccaaagtatccaccgaagagcaagtaa

SEQ ID NO: 1970 - protein, 72 aa, Homo sapien
MSYQQQQCKQPCQPPPVCPTPKCPEPCPPPKCPEPCPPPKCPQPCPPQQCQQKYPPVTPSPPCQPKYPPKSK

SEQ ID NO: 1971 - DNA, 1754 bp, Homo sapien
  Unsure 1281-1498: Unknown base
taattacttattttagttgccatatttgtaattttgaagagctctgtaactttttatttgttctttaattctcttttttacagtttttgttactgtttaatggatataataacatatacctctttggagatattaaatattgtatatatacttttttcttttgttcccagcaatgtatctgatgtctccaagcccctttctttattcctttttgttttttttggtatttttcatgttaaagtatgtcttttgttatgtggtgatccttacccgcccatacataattaaagaatgaggctaaaataatcattgaaaaccgtatgtgtttgaatggagacagggctgtcttgcatagccattcaggttgaacactgcagaactcctgcggatactatttaaatatatcctttgtagtctcaaaaattactaatgtttaccatattagaaattgaaataatgatattttaaaactattgtcaaaaataaaaataataaatatatgttaacataaatcacattttttttctgaaaaataactattttccaaagcaacagaaatttagtgagaaagaatggcttgattttacacttttgcatatttctttaatgtcaagcttagtagaaaaaaattggattctcatgtttctgaatccaatctgttgtgatacattcttttggttgaaatgtatgaagaatacccagcctcacccagtacttcaataatcttttccaataattgtgattattctcctttgatactgcaccaaaagtggaagttttcttgcttgttgcactgtggaatctagctccgtatcactgactttttttgctttgttacatcaaaatctgtttgtctgttttatattttgaatggatcttttatccatgcctaattttgtaatatcatgcattggtcatttggaacttattggccccttaagtgccctggatcttccaaatgttgaaatatttcattatataatatcaagcactcacagtaaatattagcattaatctaatcagtggtgggtaggagtttttgcttgattttattactggaaacgaatactgtcagttgttttccttgatatgacaggctcactttgttaatttttcaaaaagaaaaagtctactgaaactctagtctagatattcatagtttgacagtcattctttaaaataaaaatgatcctgttctatgaaaaaaatgtggttaagtacaactcacaactcaatcacagacccaaatattttcagtaggcaatggttgtgacttatgcnnnnnnnnnnnnnnnnnnnnnnnnnnnnnnnnnnnnnnnnnnnnnnnnnnnnnnnnnnnnnnnnnnnnnnnnnnnnnnnnnnnnnnnnnnnnnnnnnnnnnnnnnnnnnnnnnnnnnnnnnnnnnnnnnnnnnnnnnnnnnnnnnnnnnnnnnnnnnnnnnnnnnnnnnnnnnnnnnnnnnnnnnnnnnnnnnnnnnnnnnnnnnnnnnnnnnnnnnntgtgacttcagatgcctcctgaaagtggcttggattctccaggtgtccatatgtcatactttggaaacggatgatatgaattacaatgtgttgccctctggatttgtgcactgtactgtgtgcacagtctgcatgaaaattgcgtagacttcagtgtgggaaaattaggtgctgaactgactgattctttgttgaggaggatggtctcaacatcattatggagaggccaggtgtggtggctcatgcctgtaatccc

SEQ ID NO: 1972 - protein, 122 aa, Homo sapien
  unsure 2-74: unknown amino acid
  Unsure 1281-1498: Unknown amino acid
MXXXXXXXXXXXXXXXXXXXXXXXXXXXXXXXXXXXXXXXXXXXXXXXXXXXXXXXXXXXXXXXXXXXXXXXXXCDFRCLLKVAWILQVSICHTLETDDMNYNVLPSGFVHCTVCTVCMKIA

SEQ ID NO: 1973 - DNA, 14878 bp, Homo sapien
  Unsure 8376-8698, 9848-9870, 13056-13081: Unknown base
aaatatttgatatttttattggaaatgtttttgttagtttgaggggaagggtatgaagacagatctcaaggtaaagtcagagagggctgtcatcagtatgctggggagtttagggacaggaggcattggtaggggattagatgtagcagcagtcaggctgggatcaagatgcctgggggacatcttgatcttggcctttcagggcaagtgggaggctagaaaggtggctaggaaagaacagcattcttcaggtaagggtatagacttgggatgtgaggcgttatgctgaaaggttctgtcacgaggggatcagaggacagtggggaaattgggtgggttatctagcctgtactgtctgcaggtcctgaaatttgatgctgtcatagtctttgcagtgggtcggttggaatgattctgggggcagaagctcagagccccttagtaggaatggaggcggcccttctgctgccactgctcagccccctccactgcatgacgaagggtggaggaaattcccagcaacatatggcccaggccttgcagcagtgtggaggtccaacgaaggagctccctgaatggcagagacaagaggaaatcagatgatttggaaaacttgggaggaagccatcaagctgggagatgaggactttccacaagcaagagctaactaggggtaggtgggtgcaagaggacgaattatggggactatccaactgtaggggatggggcagtatgacatgttgatttctgacctgagtactttctttgggccaagtccttgaaagtcacaactcatagagtagagcccgtagaatgtggctttgacattcaggctgccaaagaggtctcgagggttttgcttgtacacgtcaaaggtgaatcgggcgatgtccttgctgtgcttgggcctctcccgtcccaggccatatgacagcactccactctgtaggacacccttgtcagtgcagtagatcctcataccagacacccaccactaatctccatcagcactgggtcagaccctccctcgcttggactttctgtccactgtgtgacatccttgacaattccacaactcctcctgcacctggtccccaggatcagggttaagctagagaggaagcccgggaaagctctaaaggacaggcattggaagcagccccagtataggcctcttacccttgtagggctccagctctgaccagactgcaacaccatcaggcacgtgtcatcctccagcagctggaagaagtcctcactgtccactgcagttccatcctcctctagcaccagggttagcactccattcagcagtagggtctccaatgcctgcccaatggcaagaagcaagaagggcaggtcttatcccatgccccttccctctttagctgcccaacatccatcagttggctctagacattggtcgatgtcccactttgactttccggcactttgatacctcctaaaggttgcagctctccgtgttcttcagtttttgggggatcctagctagaggctgacctttttcctctttgctcctaccatgtcattggcatctccccttgctcccctccaagtcacttctggtttggaattggaaagcaagccaggttctcacgaagtccacccttctgtcttatctacaatgctgcacctcacttcccacaccctcaagagttctccagaagtgttttcagtaatagtgtttaacctttttgagtccttactctgtgccaggtatgaggactttacctacattatcctcttactcctttcaacaaccctaggaggtgatgtattattattgcctttttatagttgaagaaactgaggttttggtaggttgaacaacttcccaaggtttgacaggcaggaagtggcagaatcagaatttgaacttgatttgtcacacaaatcacctttccatactagcttctgaattccgtccctcgaactctccctatctcctgctaacccctgctcccatagaaaagctcactaggtggaaaatgaacaaattgaccagagctcattaggcccactccgctgcttttagccctcagagggaggggcagctgtgtgacttcagccctctgctccatcatcacaagttgccactgttgtggagccccttggctacccctgctataggaaccgaggaacttggcctacttactttggctagcagctcctggcgggtggcagctgtcaggcctttccggatggtccgcttgtgatcacagacacggaaaggtcgctggggtggtggagctgaggtccagaccctccgtccaaactccgagcttatattagatactgacctggtagttgagaagaaaagtcaagaaggggcgaggaggggcttggtgagtgtaaagggcatgatgagggtagagtggctagagggctagggagggagagatctaggtttatcgattagggatgagggagagaccatggagtgcaggtgggggcgggtggctcaggagcttgacaagcccactgtggagtggggagcaggagaggaaggggtactggttagtctcctaggggctgagtggagtattgttgccctgcctatatcccctaaaggtggagggtagagcggagggttagcagtcacctgagtaagtcactggggttcagagctgagaggtactccatggtggaccggagagttccttccctggaacttctgggctgggtggttctctcctgtgctggggctttagtggtgttttctgttacaaacctgggatctcagcccaggacaaggtgggaatgagtcaagcctggactctggcccccctgcctggccagtaagaagggcaaagtccaaggggagggatgagggaggggccagatggggtcctggaggaagaattgcctggcaaaagccattggagcttgtatgtgtgtctttggtgatgacatgtgttgtgagggtagatgggaaccatgtaaaaggatgaaatgtgacttctggtgtttttttatttctatggagggactttctggggacggtttctggctctcaggctctgagaagctgcagtttatgagtggctctgtgtgtgctgccacctactggagaagccataagctgcagctttaggaaaagggaacccggggcagagtgtggggaagtgggatggcagcatggcagggctttggaaaatgagaggtgagagtgtgtccaggaagggtgtaaggagaggatggatcctgatacatggattcaggatcattagggtcctgtctgggacactggccttcctgcttacctgctctttccttcctccttggtcggaggaggggctggctcactgctctggcttcattttccagagctgcctgctgcagtcacacttaggtcatcttctctcacttttctccttttgccgattagtggacgtgacagagatgtgaatggggcagggatgtcctttgatggcatcaagactttagcttctggtgcgctgtgtcccagctctgatttcagttgcagccgtgatggacagttgcatggaagctgagactctcactgacagtgaaaccctcaaatgaacacaatccctgctttcctgccaaggatccttgtagggtcccccagcttccccactttttttctgtgtcctgacaaagaaacacagagtaacttgattgccctgtgacctggccagttgcatttcccctgcaggcttgagcccaagccagagccttgaaaaggtattcaggttgttgcccaaaacactgaaaaaaactggccctggccctgaaccaaataccttgaaccctcgtaaactccataccctgacccccttgttttggatatacccaggtagaacaactctctctcactgtctgttgtgaggatacgctgtagcccactcattaagtacattctcctaataaatgctttggactgatcaccctgccagtcttttgtcttgggcaatctatacttttctcagaggttcccaaggcctactgaagggacttaacatactcttaatggctttcctctctcttgttttaccttatgccctcacttcctgagttaacctcccaaatacaggatcacctgtacccaagcccttagctcaagaatacaggatcacctgtacccaagcccttagctcaagctctgctttggaagaacccaaactaagacagtgctcctggtgccctccccaagcaacctcaagttctggctgttacttgagcagaggcctttcttttcccttcccccagctctatccatctgccaggcccccctcaaatctcttcatttccaagttttgcttgacttttccaagaggagagggctgcttcttagtatgtccctactcatcctttcctttcttgtcttgtatcctggtgcagcctggtaatggggcctcttcatggttgtgtgtcatgactccctaaccattatgcctccatgcatcccctgttcctcctggaacctagcaccatgccttacatggaaaagctgtcattgacagcccggtgagagccctgagggtggagtgactggggcagggcctgaggcaagaggtgggaggaggtaggaggccaggggctcagccggaccaggagactggaaacaggcaaggataaggcaggtgggggactgagttgtttgggtcacctctgcaggccagagagaccaggcaacatacacactgcagaaggtgggctgggaggatggggccagagctgggggagggatgagaacagaagcaggaccaggattcagcagagtcctcctatttccttccaccaccagggaatcttactgccccacttcagcttgtgctgtttcctggcaaggcaggctctcacatgcctggacgcctgggtgcgttggtgatgggaaggagcagggtgagggaggggccccaggagaggcccaggatgagcctcatcttgtccctccccattcttgtcttaccctctgcaaatgtgataggcacaggacaggagtaggcacctcgcctactgctgcttaacctttcagcttctccaggcccccaatcctgcttgctcccagcttggtaagtagatctgtgcacgtccctttacaccccaccatccagttttgcccagatgtgctagaatggggctggacaaagaaggaggggccagactagaggagtggtggtagagatagtgacagcctggggtgatgactttatgcctgtttaccactgagctctgggaaggaggccaggagtggggcaggtcaactgactgggagcaggggatctgggttccaagaaggagttgtgtttgaggtggggtctgggtcctcgtggaagtcaggactcccaggcagaaaagaggcaggctgcagggaagtaaggaggaggcatggcaccttctcatcgggcatcacaggtggggttttgccccacccctgaacgccctctgtggcgccttccacccacctgtaggcccagaaggatgtcggtctgctaccgtcccccagggaacgagacactgctgagctggaagacttcgcgggccacaggcacagccttcctgctgctggcggcgctgctggggctgcctggcaacggcttcgtggtgtggagcttggcgggctggcggcctgcacgggggcgaccgctggcggccacgcttgtgctgcacctggcgctggccgacggcgcggtgctgctgctcacgccgctctttgtggccttcctgacccggcaggcctggccgctgggccaggcgggctgcaaggcggtgtactacgtgtgcgcgctcagcatgtacgccagcgtgctgctcaccggcctgctcagcctgcagcgctgcctcgcagtcacccgccccttcctggcgcctcggctgcgcagcccggccctggcccgccgcctgctgctggcggtctggctggccgccctgttgctcgccgtcccggccgccgtctaccgccacctgtggagggaccgcgtatgccagctgtgccacccgtcgccggtccacgccgccgcccacctgagcctggagactctgaccgctttcgtgcttcctttcgggctgatgctcggctgctacagcgtgacgctggcacggctgcggggcgcccgctggggctccgggcggcacggggcgcgggtgggccggctggtgagcgccatcgtgcttgccttcggcttgctctgggccccctaccacgcagtcaaccttctgcaggcggtcgcagcgctggctccaccggaaggggccttggcgaagctgggcggagccggccaggcggcgcgagcgggaactacggccttggccttcttcagttctagcgtcaacccggtgctctacgtcttcaccgctggagatctgctgccccgggcaggtccccgtttcctcacgcggctcttcgaaggctctggggaggcccgagggggcggccgctctagggaagggaccatggagctccgaactacccctcagctgaaagtggtggggcagggccgcggcaatggagacccggggggtgggatggagaaggacggtccggaatgggacctttgacagcagaccctacaacctgctgcccttccctgtccctttccaccccccacccaccctccagaggtcagtgttctgggacatttggggacccttctttgactagagtttggatctggctgggtaggattactatacacttggggcaggcccaggctcctccaaactgagggattatgagggtggtgatggtccctgttaaggactattgtgtgcttgcaagttggcatgtacccatgtgccagcattgctcacttgttgccaatagctgttattgtgaaatacactgggaagccattagatgatgacttaagtgtgcttcccctggtggttcttcatgcctgagttgtactgaagccacctagttccctgctgggtcaagccaggctgggcagtgccagccttcagtggcatcttgacctgccctcctcagcccaggtgccctggttccacaggccaacccatagaaccactctggaaataaaggagaaaatggaaggagaggtatgggagcttggatgaggggtaggaatgggatccattctctgaggcttataaaagcctctgaggaggaaatggctctgaaggggaaaacgaatctgtggggtttgaaaaggaagttttcctggctgtcttgtatttggtccagtgagtatgagacaggcacacaaggagtggacagtggtgtaggggccctgggagtctgagacttaccttgccccctgaccatctgatcctccctgcaaaggccacctgacgtgaaaaggagccaggagcaagcactcagtcagggaagtttggaggttggccattggggtatgaggaatggcaggaatatttagaggacaggaataatttttcagagaagtgccacatattctttttctctttgccaagtctgggctccttctaagatgctgctagctattcctagcccgttccccaatacttctctgcccccaccttttggaatccttatctaggtctaaaaacggttctagatcctgacccctttgattgggggatgtagaatgggattcttttcaggggacatccacaagtacacatctgtggtcactaaggtgaccagctcatcccagttggcctggaactttcccagtttaagcactgaaaactccttgtcccagccctgccggtttcccaacgaactgagatggttggccgctcaagtggctaccctgaccatcaccccaggctctactttagcgactgctcacacctccctgcttcccagacagaagtcaaaacagcaaaagaaacccagtccccagggtcatgctagggctaccaaaactgggatgaactagcacctgtgaactagaacagcagggagtatgcttagagtgcctggtcctgggtgtggggaagaaaggccatcaaggtagatgcgggtggggaacagcttgagagaggaggcaaggacaacccagtttctgtctgaaggggcctctggttgaccctggagtttctgtccccaaacacaggcctcacgggattctttctgtcctcatgcactgggcagaggttccttaacttcctttgttgcacattgccattctctcacatcccgtgcggtcaggaagcccttcctgaactctgacttcagttcttgctgcggtttctgcccatttttttcatatcctctgacagctgcgaggtcatctctgctctggcttttctccaagcagaacaagtgggggctctggaaaggttaagggacctcagtggccaccattatactttgcatctttcctgagaagtgagagttgaaagggaagcaggaaggcccatggtcagattgaaggaaggacnnnnnnnnnnnnnnnnnnnnnnnnnnnnnnnnnnnnnnnnnnnnnnnnnnnnnnnnnnnnnnnnnnnnnnnnnnnnnnnnnnnnnnnnnnnnnnnnnnnnnnnnnnnnnnnnnnnnnnnnnnnnnnnnnnnnnnnnnnnnnnnnnnnnnnnnnnnnnnnnnnnnnnnnnnnnnnnnnnnnnnnnnnnnnnnnnnnnnnnnnnnnnnnnnnnnnnnnnnnnnnnnnnnnnnnnnnnnnnnnnnnnnnnnnnnnnnnnnnnnnnnnnnnnnnnnnnnnnnnnnnnnnnnnnnnnnnnnnnnnnnnnnnnnnnnnnnnnnnnnnnntagcttttgcaggagacttcaaggaaaggagacattcctctgtccaggaaacgggtaaggggaccatttctgcattgctggtttcccctcttggcagggtgggcatgaggcatcactgttcctgctccctcactcctgctcctcatgctcagcctgccagctcggcctcaactttgtgtgtctaaagtgggaactgaataggtaggctgtgagaagataggaaagaggtagtgccaatctccttgcccagatcataaaaaaatttcccccaaagactcaagcagggtaaccacatgggcaagcacaaggtaggtgcttggcgaaaggggaagtaattggcattctgtgtgataccaaggagaccatttggattttggcttctaccaaagagaatggagaattggttgacctaaatggaaccagtccctttaagtaaggggaggaaagggggtgctggaagatggccctcttcccaccacctagatcatagcttgaactgaagccaaggacagagtgctgcccccttcggcatttactgatgtgccctctttaaatcatgatgttatctaacccaaacccagacccaggacctagtcacagctccaacctacacttcctattaatcttaaaacaaagcaaaacaaaacaaaaagatatcagcattgtagcctccaatctgagcccatttcccttctctggctaccatacctccttctcctatatgataccattcactactttgttcaattatccagtctagacctgcatctgaggccacacccagccttctcactccccacacccctctttcctctctcactgctccttcctggtctcttctcatctggccccacctctaaggagtcctcctgccttctgggttgccctggaaaacagactatcccccctcctagtgaagggagtgggtaggggtttcagccccaccctcaggaagatgcgtcttccctgtcctctgctctgtggtacttcctctctggctgatttagcaaacagcacctagacctggggccaggcctttggcagtgggacagatccagggataggctacaccaccctgccctgaccctgggattggcatcagcttccaaccagttcctgccaaagcttgtaagtaagtttcctgggagcnnnnnnnnnnnnnnnnnnnnnnngacagtgtgcagccatgaaagaaggtgcaaaggaatctccaaagaaagcctgaccagcgtaaaaagttgggaggctttgtccttgtcacttgtccactaaactcctcccctccctgttattcctggttgaccctgggcatctctggggacagtaggcaggtgattgggaaagttaatgggattgaggggctgagggcctggcagggggcaaaaagactggcctttcaaggggtgcagcattggtaggaactctgtttggttctgggctttagggtctcctaaggggaggagactgaaaaggtctggaaatgctgctgctgctgtggtcactgtatattttgcaattgggtctgtggacaggaaggggccgcatgacccagttaggaaactagtctttgtactcaaccagatccctttaagttgtcagtctgcagcgatgggggcagtatatttcagggggacctctgatgctgctgaccctggagatagactagagttctcagcctaggtgtgtccatggcgtcaggaaacccttggtcctctactctcatgcgtgtgtccgccctcactctccaggtcctcccgacggccatgaacactacatcttctgcagcacccccctcactaggtgtagagttcatctctctgctggctatcatcctgctgtcagtggcgctggctgtggggcttcccggcaacagctttgtggtgtggagtatcctgaaaaggatgcagaagcgctctgtcactgccctgatggtgctgaacctggccctggccgacctggccgtattgctcactgctccctttttccttcacttcctggcccaaggcacctggagttttggactggctggttgccgcctgtgtcactatgtctgcggagtcagcatgtacgccagcgtcctgcttatcacggccatgagtctagaccgctcactggcggtggcccgcccctttgtgtcccagaagctacgcaccaaggcgatggcccggcgggtgctggcaggcatctgggtgttgtcctttctgctggccacacccgtcctcgcgtaccgcacagtagtgccctggaaaacgaacatgagcctgtgcttcccgcggtaccccagcgaagggcaccgggccttccatctaatcttcgaggctgtcacgggcttcctgctgcccttcctggctgtggtggccagctactcggacatagggcgtcggctacaggcccggcgcttccgccgcagccgccgcaccggccgcctggtggtgctcatcatcctgaccttcgccgccttctggctgccctaccacgtggtgaacctggctgaggcgggccgcgcgctggccggccaggccgccgggttagggctcgtggggaagcggctgagcctggcccgcaacgtgctcatcgcactcgccttcctgagcagcagcgtgaaccccgtgctgtacgcgtgcgccggcggcggcctgctgcgctcggcgggcgtgggcttcgtcgccaagctgctggagggcacgggctccgaggcgtccagcacgcgccgcgggggcagcctgggccagaccgctaggagcggccccgccgctctggagcccggcccttccgagagcctcactgcctccagccctctcaagttaaacgaactgaactaggcctggtggaaggaggcgcactttcctcctggcagaatgctagctctgagccagttcagtacctggaggaggagcaggggcgtggagggcgtggagggcgtgggagcgtgggaggcgggagtggagtggaagaagagggagaggtggagcaaagtgagggccgagtgagagcgtgctccagcctggctcccacaggcagctttaaccattaaaactgaagtctgaaatttggtcaaccttgtgagtggggtacatgtgctgtgggtatcggggtgctcgtgggcgccctggtggggcccctctcggtagttgagagtcacgtcctttagttccccatgatttacaattttggaagggacacaaagaaacatagactgcccccatcccagatgattccgagtacatagtctgcagataatacttagcaaaacgcagtctacagactcctaaagcagcttgtctaggaagaccacccatgtgggcttatcactccaggttctgtgacccgggaccttctgagaaaacagcactgctgtgaaatatcttccttgaagcctgtgataagtctccttgttagaatgactccaacttcctgccaataatctttgtcctctccataggagatgttctaggggatgccttccttccctccatttcacaaagaggccagacttgaggactaagtcattagatcttatcccttagaattttgcatatcagcatctgctaacctccacaacacaccctggcacagggtggggctgagggccccaggaaacaaagattcccaaaagtgagagggatgagtcattatttcctagagatgactgttgttttagagaaccttggtccaactctgttctgacaaggttttaggaagatggcaacaacagtggcagcagtgtactttttggatctttctcataaaaaaacaaaagagcaagtaagagagggaaaccaaatatccacatgcaacatccgcaacaaatctagtatgtcaaggtttgacatactcccatggaccccaaagtatgagccagtgagaatgagtcatcaatacctcaagacccatataccagcatctgtgcagaaggatgcagaaggaagcaaagggatgttggatggacctaagaagaggagatccccaagctgtctacagatccttactggaaggtatggtgcaccaatttgagaacagcagctgaaactgggagggacctaacggagtatttcccagtcctctcgcccattctgtatggtgagcacataataggtacttatttagtgtttgtcgaattaataaagttcaaatgacatttccctggagattcttccggtatttttgagtagggggcaggaaagggcaaatttttgttttgagtcatgtggctaaattctttatgcttccaaggtgtacaaaatactataatcaagttggcagagaggctgagggagttctcttcctgagcttgtgaaaaaaatcactccctttcaaaatgcttagtctcacatgcatgcatgtgtgcaggcatgtgnnnnnnnnnnnnnnnnnnnnnnnnnnctaaaattggcctgggaagaagaagaattcccactgaagggcaatgagaaggtgatccccagctatatcagcagcttcagacatcaatgggctccagacaccccagagtctctttattgaggttcttagaaggcgagtgcaatctcagcctagggtagctgaaggaggtccagttcgtgtcaagtctgtgttcaggaagtaggtgcagagctgccctttgcctttcaccttgatgacaccccggctgtagcaggtgtagcccagggactgtagggcccatgctgtctcctcagtcacctacaattggaggggggcgagggaatatggaggtggccctattcttagtccccctccccctatgcctccaatgtggttccctcacttggattttgccaaggactcctgtactctccatgcggctggccacgttcactgtgttgccccaaatgtcatattgcggcttctgggccccaataactccagctactacgggtccatggttcaaccctaatgagggatgtggtaatgacagacttggagaaggaagaggggaagaggaagccacaaggaactggaaggaagggagaagagcctggggggccctagaggagaggaggggtctctaagggctggaggaatgtagcttaagaaaaagagtgggagagcctcgtacctccttgcccagcaccttcacaccccatcccagggagtgagtcaggaaaggggcttcaggatgaactgggagcagctaacaaaggacttggagtggggcaagctcaggaaggtgaggaggtaccagactgctgcagcaggggaagtctctcacccactcgcaggcggaagttgttgaatgaatgcttgttgatgacgtccagcttagaccccagggccacggcaaattccaccatagtgccaaggtggctgcagctccgttcagcatcctggcaatgggcccgcccaccagggtgggccagtgagggcacaggaataagtcccactaataagcccatcaatgagagcccagaggaggatggtaggtaaggaagggttgccgtacctgttgtgcatcctgtccagaggtggcatttaagcctgtggctgccatgtaggtgctgccgatggtcttgatcttctccaccccactgaacttgggcttggagagcagctgtatatagagaagagtcctgtccccagtctctcttactctctccatcacctctcccagaagcccagccccaagcctttggagttaaaggatcaggctgtgggagtggagatagtgtcaggaaggagagggttggtggtgggcagtgttgctggagtgggtagatctgggggatcagaggaggtgagggagtactgtggaggggaggattgacttcatggccagaaaagcaaagtggaaggaggtactggtggaaaattctagaatctaggacatagggtctgggagactcttggaattttcacctcatcaaaatcagcaattatctcattgagcagcctcagacactctaggccctcatgattgatgttggattcagagtagaactccttgaagtctgggactgaggcgaagaggacacaaacgcattcataggactggtggtagagatcctgggggaacaggagactggagtgaggggtgtgtgtcatgttcctctcccttctagaggtctgcgtggggccctcctccccatgtccacactcctggtctccctgtttaagaagaattgggaaggagggagaggagtagggccaggctaccccagggaagtgacttaggagtcaaagctt

SEQ ID NO: 1974 - protein, 352 aa, Homo sapien; identical to SEQ ID NO: 1136
  Unsure 8376-8698, 9848-9870, 13056-13081: Unknown amino acid

SEQ ID NO: 1975 - DNA, 1146 bp, Homo sapien
  Unsure 772-790: Unknown base
ctgtaaaaaaatttagatattaagtgtgtaatcttggggcagtttccaggctttaaaaatgggttcaaaatttctgatgggattatttagcagaagttcttagaagtttgtccttatgactgaaaacagatatttttggttcctgtatttgggtggcaaacaaagtaacagtacagctttaatgtatttgtaacattggccacagtgagtctttgataactgaaggatagtgttttccattgttctctgttatcctcaaagtaaaataaggggaaagtgttcagattcatccttacatgtgttctaggtactgtattgctcatgattaaaattaatttaaattaattggctaattgttcagaattaatccctttctatgagaacaactaaaaagggaacaactacaaaagagtacaactattgagcctactatggttggaaaatacttgaaagtatcatttaaagatggttactttaattagatctccgtactaaacgtgggaggatagctttatattttactttttgaagagcattaagttctggtctgtccatttcctgaaattctgagctatgttattcatctctgttgttggctctataatgtatgtatctgtttgctgctattcataataacaaaggtcttagcgaagacctagcaatcttagggtaataggaagacagaggaatttcatattggaatttttaacttgcagatcacaacttgttagtgttttatgaaatcagtgtagtgggtcaaaaccactatagnnnnnnnnnnnnnnnnnnngaatgaagataaaatagaaaatgtcagagagtattctatataataatacaaatattgtttggtaagattttaagttgtatctatatattttatacacacaatgggtgttgggttgtgatataaattataatcttttggtggattgtggttaactaaagggtttaaaatttatcattttagttggtttctttgttctctggtgactggttcaggtatttaatcttcgtttccgtatctgagtaaatggtgctgataaacattgcatactctcttggaatgtgggtaataactaagtgcccgagtgaatgaccactctcaaaaattggtaccttatcttatgattctagtgatatcag

SEQ ID NO: 1976 - protein, 6 aa, Homo sapien
  Unsure 772-790: Unknown amino acid
MILVIS

SEQ ID NO: 1977 - DNA, 761 bp, Homo sapien
ggctttaatctctgtaaaatgtttacaacagcacttagtgagttatttgtaaatgtatacaaccacaatgatgttattgttgtcttatgttttaccagactggcccaaagtccaaagaacatattattcaagcagtgcgattccatgttaaacatgagtcaaatttagctgaaggagcaagtttggacaagatgcctaaagcacagcagtttttcacaatgttagaattgataagtgctgtaatgtatctgaaaatataagtaataagtaggtttgcagtggtgtgctaaagccagcttatagacatgcaggaaccaattgttagttgacgtgttgatggcttcaaaccagtcagtgaaagtatttacattatggaaatcaggaacttttttcctcacaaagaaagattgttgttaaaaatttacctgctcaccactggatttgggacgtctgagggtatgaggcatttggttggtggaatcatgctactacatccttttgcactcttggcttgggtgtgtgtcttttcatttcatcagctgtcctaaattctggaagaaacctgtcagggtaaagtgtgtattctgtctttggctcaaaaaattataggaatgctgaccccagttacacatgattctctatcagcctaatacctaaacaggaaatgctttaaagtatcctaagttccagctcaaccttctttttagctatgtgatgaaggcaaagctttagccgtaatgactctcaatgttaacattaaa

SEQ ID NO: 1978 - protein, 55 aa, Homo sapien
GFNLCKMFTTALSELFVNVYNHNDVIVVLCFTRLAQSPKNILFKQCDSMLNMSQI

SEQ ID NO: 1979 - DNA, 614 bp, Homo sapien
ggtgagtccctccccaggtgggtctgcccctaccccgtgtgggcgggattagctcccagaggctggccaggccccacctgggtgaggcttgaggtcagggccccaaggctcagattcaggcttggtggaacagagcaggaaagagacccggtaccgaaagtgagcggggcaggcacctatgtcacatgggtaatgggcaggggtcggtcactggctttggctccagggccagagcagtctgacttagtgttgagctccaagcatggaacactggagttggttcattttgaccagcaagcctctaaatgggtgccttgattactccaccgcaaggagagggcagttgcctttttatgacatgttaattccagccaggtgagtcaccaggtagctctcatcctcctgccaggctcccctgcctgtcggtttggcattgtcagataatgtgatcattcattgaagtgacatttgagttccaaaccagttttctcctttaaccatttcaccctcaggagtgattctcctttgtttggcattgtcagggaatgtgatgatccattcaaatgacttttgagttccaaatagtgtttctactttaacttcctaaatgaaaa

SEQ ID NO: 1980 - protein, 105 aa, Homo sapien [sequence omitted]

SEQ ID NO: 1981 - DNA, 1038 bp, Homo sapien
  Unsure 555-671: Unknown base
gtgagcgagaaaaagctactgaatttttctaagctcagtctttttcatttatgaaatagagatatccttgtgagccactgtgcccggccttgatcattttaaattcataaataatacttagcccctgagtaattataataaatatataattaatgcatatatcacccatagttaattaggaatattttattggcttaatgagcaaaatatgatcataaaatataagccatcatagcccagatgtatagcaataaaagagcttagattataatatctcacaatacaagtctgcattagcaatgacactgttataaaatatttataacactttctgatttaattttaaagagattcattcagtatctttttggcatttgaaatgaaaccttattttccctccacacaatagctgattaaaaacagcttttgaagaggtcccaggcaacacacacagaggggaaatggttagatacgtggggcatctttgtattttcacattaaaattcaatgttattcagacccaagtagatagataataaaagtggcattcaacgnnnnnnnnnnnnnnnnnnnnnnnnnnnnnnnnnnnnnnnnnnnnnnnnnnnnnnnnnnnnnnnnnnnnnnnnnnnnnnnnnnnnnnnnnnnnnnnnnnnnnnnnnnnnnnnnnnnnngactttagcctgggtacactacaagaccccatctctttttttaaaatgttacatttataatcagtgaggaaaatataaactatacaataaatgaaagggtcattggccaattgtttggagggaaaaaatacaccatgttctaaaataaatttctagtgatttattgtgactttcatgcatttggatgattttaaagattttatataaaaatgaaaccatagccttacgagaagaaaatataaagaaaaacttgtatagtcttgggaggggggattatattatgtgaaacattaagtaaaatatttattttttaaatattaaaaaactaaaaactgtgctttagaagtcaccaaaaaattaaagggca

SEQ ID NO: 1982 - protein, 17 aa, Homo sapien
  Unsure 555-671: Unknown amino acid
VSEKKLLNFSKLSLFHL

SEQ ID NO: 1983 - DNA, 416 bp, Homo sapien
tggagtaacacatttaaacttaccagttcactgttaaaaaaaaaacttgaaggtttaatcattacagtgacttacagcatatcttactccaaacgtgtgatgttaactatggtccatctatttctagaaatttaaggcaaaggatgattttagtaatgaagtttccaataatgccatcttaaacttgttttaggtttccaaatataaaaatacttcatgaacacagacaggaagggcaataagaattaaacgagataagatacatttgataaatgttagcccagcaactacttttgttgtcactatttctgctactacagttattataatcaaaaacttcattcattcctgagaggtatgagaaaaaaaaaaaaatttaggccaagggtgatgggcctggtagtcgaagcatttgg

SEQ ID NO: 1984 - protein, 44 aa, Homo sapien
WSNTFKLTSSLLKKKLEGLIITVTYSISYSKRVMLTMVHLFLEI

SEQ ID NO: 1985 - DNA, 1799 bp, Homo sapien
tggcttttcaaaaccctccaatcctgttcattcttttctctgtagtttttctgacttattccagggacttccctttctagattataatcttcttagtctgtaccatataatttgtcacctaattatctactgtttcactttctgttggtttcgtggacattaatcttctccccagccaactgatggtagtcatattataataactccccagattggtttgtgctctgcactttacaaatcactccactgtttaagacctgtctttttgcttatcatgcccacagctgctctgtgaggtgggacaggaggggattgttatctccatattattgtaaacaaattcaaagaaagcaggtgacttcccaatgtcatatatgtaattaggggcagaacagaaactatatctcaggtttactaatttctggcttagaattttatctgcaggctcttctacatttgtttttttccttaccatttcccctcttgccttcaagggtcactcaaggcagaacatctaccttgtgggtttttaggaggtttggttggtgacccagtgaatggtaaagtagcccagatatcaatcttaggtacttctcagtggcatcagtgttctgggttgctattgccgagagaattctctttctgtggctattaggattaatgttgaactaagaagcattagattattatgaatggtcagaacacactctcatggagatccaggaagcaggacaggatgtgtggtgctgggcacttttgtgttgtggcaatggcatgagtttgcaagcagtcaggccagagtttgaaatctggctttgctgttgtttgctggcctcatgacccttagtaaatcattaatctctctgagccttagggccactgagagaatgtatttaagggccacataatggcctgtgaaaacagtatttgttgttggtttttattgccaatactactttaagtttaaggtgcctgaagggcattagaagcctgctagcacctgtgacccttgcaggttacttctcgtgtcttgatttccaagcattagtgatgactaccttggaagctattggctgatagaggatgagcttgaatgctgttcccaaagtctcccgtctcccaagtttccagtgccttctcagggcaatgaaaatagtttgtggacagctgggggatggtttcagtgtcaaactttgggagtaaaatctttcatgtttttctgaagaactttggcattagaattgttggttctggaaagtcaagaacacagttgttattgagagattttagttatttctgaaaccagatattgctccaaagctgtttgttaaatacttccctactcttcctaaacccctgcccctccccaaaagaaaaataaatcatattcagaccatcgtgcgatggttatatctctggcctccctggtcacccagcctctagctctctgctagcaccactccaaattgctgcttcaaaagaggtcagtcagcccctttcccttactcctcaaccatgacctggtctgtctggaaagaggatgagatacatggaccaatacatcctatttaaaagggagcttgctttctcactagggactttagactgcctgacacacaggaaatgactagaaaatctgaccagtggagcataactcattgctaaaatggcaggtttggacggctgcaggatgggagagcaggcttcctgaagaggcaggaaggggcagctggatgggaaaacagtgacttttgagtttttccttttagagtatggtgacgtaggccgtttattaaaaa

SEQ ID NO: 1986 - protein, 53 aa, Homo sapien [sequence omitted]

SEQ ID NO: 1987 - DNA, 1084 bp, Homo sapien
ctctcttgttggctgtctacttgagtcaccgattggcacagccagagctataaccagtctgtgaggattgatttgccctgacttgtatcttcatgtgtggtctataaggtctgccagattggcttatagtcacaaccagcatgtcctaagcaaaatgaaactatatgaacaaaaatcagctctcatttcactgctagactttggtgttttctttaagaagtagccttgtttaatgcttagttttgccttgggggccttaatgtgtcattaactgcctggaaatacctttcatttaaaaaagtatactttagtacctaatgttcaatttagtatcgatctggatattttagcaaattttgacttttcaaagacaaagtttctgtcttgtaatgtttcttgggccggctatactgcctttcatctaaaactcactacagttcactgggccgtttggtaacagggtaacctgggcataattaggtgcttgattgacaagagagttaccagtaccagaagtcaggttctattttaaccccatcatttccaattgattgtttttctctccaccattattcactgtctctcaagtgttagcactctgagttgttgaacggaggtttgtatgctgcgcagagccctgtcgcaatgccccagcaagcttcttgttggcatgtggccactctaaattgtgctccaggatctgctatgggtccatgcttgcaggagaaacagctgtgtagaatttcctattgcatttcatttgtgggtttagaactcggttgcttatttcatattgtctcccttttcagtccttcaaggtacatttttccaacttctctaatgaattattacatttctgagtagctgatatgtttttatcttatctaagcagtatatttataattccttctttgcattggctaatctgattagtagttcagaacccaattttcagattgtctatagcaaactgtgaagaactgtgctgtcaagtagaaatagaatataagccacatatgtaatttaaacttttctaataccacattaaaaactataaaaggggaggaaatggaaaattagtaaa

SEQ ID NO: 1988 - protein, 20 aa, Homo sapien
SLVGCLLESPIGTARAITSL

SEQ ID NO: 1989 - DNA, 1058 bp, Homo sapien
cagaaacagcctgtagagagcatcgacaaggcgcataatggagagttggtatctcaaccccaagctccctttgctgtacctgggctgctctgtgaacaagaatccacgcccccctgccctgctggggaccacataatgatccctttggggaagttgctgattgcagggcaagctagcttggtaaggaaaacctctgcaccagcggcctattcctgcctcttggtccatagcctcatacactcatgttgatggatagtatagatttgctgcccacaccagatatctgtaaggcatcactgtcctgattctgaacctctgtttcaggaagcattctcccctgtgtaaacaactcaaggtggaagtatttcagagggcatagggtcatgaatccttacccaaaggaagcctgttttagcagtggatgcaggagttgatgaacagacaagcaagttctgcttctgtcctgtttcctcctgacagctccattcttttgaagcctgacccttcctaagctctgcatcataaccactctgagaattgccccattgggtgggcatgtgaagcccagctctgttccatccaggtgcctcgagcctgaggagtctgaggatctgacttgggtcttggaagggttccaaccccaagtcagtcaggaagctgcccatttttttgcaaggcattttaatgccctttcccagacctctctagtccctcctgccttctgttctctgtagctgtgagccctttgtgagaatatgactcttaattttgaatcttatgtaagaggcttgagatgtgctggagagggcaggaagaggaaagtatcaggccttgagagagggaatgtagctttgcttctatgatctggagtcaccttcacttgctagctgagtcctaacacaacttccaagtccatgattctcttggggcattggatgggctcagtgtgggtctcttaggctgttcttgtgacttcatcatttcctggttcaaagttgtactgtcaaggggcagcatttctggtatttctataataaatttttctgtgatctcaaaaa

SEQ ID NO: 1990 - protein, 82 aa, Homo sapien
QKQPVESIDKAHNGELVSQPQAPFAVPGLLCEQESTPPCPAGDHIMIPLGKLLIAGQASLVRKTSAPAAYSCLLVHSLIHSC

SEQ ID NO: 1991 - DNA, 1316 bp, Homo sapien
gaattcactagacataacgtggaaggaaaacgtcatcttctgggagtacagggaagccagcccctcatagcgtatggaagacatacctgcaatggaagctgttgcccaatgtctccattactatctttcataagacgagccaggcccagcttcagatcaaaagttcttgagacagaggaacaaaaccaatcgatttccagggaagctaatcaactctcttttccctctaccacaaaactgccctgctggagtggttctgaacctgtacccaggactcgatgtggtcactaataacaattaacctgaactgagtccacagaactccactcggaactttcttcttttttaactagtggcccaatcattcccaccatctctgtgctgataagtacgtgtcctagatgagaaccctgaagaatgcagaccttcttcccccgaaggagatgccacaagctctccaacacagccccctttagttccaaagactagagatgaccacattggtagaagtatatctcgaggcacaggaagggagccccaccagggataattcagacaggactagagaataacatcatttcacataccctgggataaacaccctgggttcctatagaaggactattacttatgggagtccaacttctcctttagttttgttattatcagtttatctttctcccactccacttttccttcaaggtaccaatcctttcctgttcctcgtttggccatctttctttttctgcctccacattgggaggggaggacttctcagttctaacaagctgccatactcctaagaaagccatttttgaaaaatttaacaatccaggttcttctggagaactcattctccacacgcacagtttgctgcaaaaggaagttgcaagaatttcttgaggaagaaactggtgacttggtccatcagtcacgaagttctttctattctcgtttagttttcaagaaattattggtttgtgttgctctggggaaattggaaatcattacattgtaaagacaaatatggatgatatttacaggagagaatttcagatctgggtttttgaaagaaaacagaattgcgcattgaaaacgatggaaggaaaaagacaatggtctaatgtgcattcctcattacctctcgtggctttggctgggagttggaaaaagctaaaatttcagaacagtctctgtaaggctctctgtggctccagttcaccattttatattgttgcatgctgtagaaaggagctattgctgttgttttgtttttttatttaaatcactaaggcactgtttttatcttttgtaaa

SEQ ID NO: 1992 - protein, 96 aa, Homo sapien [sequence omitted]

SEQ ID NO: 1993 - DNA, 533 bp, Homo sapien
  Unsure 67-68, 74-123: Unknown base
gaagttctggaggccaaaatttttattctaaaatccaaatctattttaaaagaatagttctcaaaanncatgannnnnnnnnnnnnnnnnnnnnnnnnnnnnnnnnnnnnnnnnnnnnnnnnnggcaggagaaccacttgaggccgttcagtctagctgggtaactagcagacctgtccctaaataataaaaaatttaaaaaccacaataatgtgagttacaaaaaagtgtaacttatgaaaagtcgtatttatattgacctttgtaagagctcaattatttcaggaagcaaggaatatcaccattctgagtaatacaatttcaactaatctttatttcttctacttgaagtcagtgcctatctaccacaaacattcctatatcagtgtgcaaattaatttggagacaataggctttttacgacaatgaattggttaacttttaaaagttgttttttatctcacattttataatacgataaataaatgtacagcagatctttaagaacattgtttaactataatgttgatggc

SEQ ID NO: 1994 - protein, 53 aa, Homo sapien
  unsure 22, 24-41: unknown amino acid
  Unsure 67-68, 74-123: Unknown amino acid
SSGGQNFYSKIQIYFKRIVLKXHXXXXXXXXXXXXXXXXXXQENHLRPFSLAG

SEQ ID NO: 1995 - DNA, 4595 bp, Homo sapien
ggatccagctgtctctccttgcgatcctgtcttcggggaagtccacgtcctaggcaggtcctcccaaagtgcccttggtgccgatcacccctcccagcgtcttgcaggtcctgtgcaccacctcccccactccccattcaaagccctcttctctgaagtctccggttcccagagctcttgcaatccaggctttccttggaagtggctgtaacatgtatgaaaagaaagaaaggaggaccaagagatgaaagagggctgcacgcgtgggggcccgagtggtgggcggggacagtcgtcttgttacaggggtgctggccttccctggcgcctgcccctgtcggccccgcccgagaacctccctgcgccagggcagggtttactcatcccggcgaggtgatcccatgcgcgagggcgggcgcaagggcggccagagaacccagcaatccgagtatgcggcatcagcccttcccaccaggcacttccttccttttcccgaacgtccagggagggagggccgggcacttataaactcgagccctggccgatccgcatgtcagaggctgcctcgcaggggctgcgcgcagcggcaagaagtgtctgggctgggacggacaggagaggctgtcgccatcggcgtgcctgtgcccctctgctccggcacggccctgtcgcagtgcccgcgctttccccggcgcctgcacgcggcgcgcctgggtaacatgcttggggtcctggtccttggcgcgctggccctggccggcctggggttccccgcacccgcagagccgcagccgggtggcagccagtgcgtcgagcacgactgcttcgcgctctacccgggccccgcgaccttcctcaatgccagtcagatctgcgacggactgcggggccacctaatgacagtgcgctcctcggtggctgccgatgtcatttccttgctactgaacggcgacggcggcgttggccgccggcgcctctggatcggcctgcagctgccacccggctgcggcgaccccaagcgcctcgggcccctgcgcggcttccagtgggttacgggagacaacaacaccagctatagcaggtgggcacggctcgacctcaatggggctcccctctgcggcccgttgtgcgtcgctgtctccgctgctgaggccactgtgcccagcgagccgatctgggaggagcagcagtgcgaagtgaaggccgatggcttcctctgcgagttccacttcccagccacctgcaggccactggctgtggagcccggcgccgcggctgccgccgtctcgatcacctacggcaccccgttcgcggcccgcggagcggacttccaggcgctgccggtgggcagctccgccgcggtggctcccctcggcttacagctaatgtgcaccgcgccgcccggagcggtccaggggcactgggccagggaggcgccgggcgcttgggactgcagcgtggagaacggcggctgcgagcacgcgtgcaatgcgatccctggggctccccgctgccagtgcccagccggcgccgccctgcaggcagacgggcgctcctgcaccgcatccgcgacgcagtcctgcaacgacctctgcgagcacttctgcgttcccaaccccgaccagccgggctcctactcgtgcatgtgcgagaccggctaccggctggcggccgaccaacaccggtgcgaggacgtggatgactgcatactggagcccagtccgtgtccgcagcgctgtgtcaacacacagggtggcttcgagtgccactgctaccctaactacgacctggtggacggcgagtgtgtggagcccgtggacccgtgcttcagagccaactgcgagtaccagtgccagcccctgaaccaaactagctacctctgcgtctgcgccgagggcttcgcgcccattccccacgagccgcacaggtgccagatgttttgcaaccagactgcctgtccagccgactgcgaccccaacacccaggctagctgtgagtgccctgaaggctacatcctggacgacggtttcatctgcacggacatcgacgagtgcgaaaacggcggcttctgctccggggtgtgccacaacctccccggtaccttcgagtgcatctgcgggcccgactcggcccttgcccgccacattggcaccgactgtgactccggcaaggtggacggtggcgacagcggctctggcgagcccccgcccagcccgacgcccggctccaccttgactcctccggccgtggggctcgtgcattcgggcttgctcataggcatctccatcgcgagcctgtgcctggtggtggcgcttttggcgctcctctgccacctgcgcaagaagcagggcgccgccagggccaagatggagtacaagtgcgcggccccttccaaggaggtagtgctgcagcacgtgcggaccgagcggacgccgcagagactctgagcggcctccgtccaggagcctggctccgtccaggagcctgtgcctcctcacccccagctttgctaccaaagcaccttagctggcattacagctggagaagaccctccccgcaccccccaagctgttttcttctattccatggctaactggcgagggggtgattagagggaggagaatgagcctcggcctcttccgtgacgtcactggaccactgggcaatgatggcaattttgtaacgaagacacagactgcgatttgtcccaggtcctcactaccgggcgcaggagggtgagcgttattggtcggcagccttctgggcagaccttgacctcgtgggctagggatgactaaaatatttattttttttaagtatttaggtttttgtttgtttcctttgttcttacctgtatgtctccagtatccactttgcacagctctccggtctctctctctctacaaactcccacttgtcatgtgacaggtaaactatcttggtgaatttttttttcctagccctctcacatttatgaagcaagccccacttattccccattcttcctagttttctcctcccaggaactgggccaactcacctgagtcaccctacctgtgcctgaccctacttcttttgctcttagctgtctgctcagacagaacccctacatgaaacagaaacaaaaacactaaaaataaaaatggccatttgctttttcaccagatttgctaatttatcctgaaatttcagattcccagagcaaaataattttaaacaaaggttgagatgtaaaaggtgttaaattgatgttgctggactgtcatagaaattacacccaaagaggtatttatctttacttttaaacagtgagcctgaattttgttgctgttttgatttgtactgaaaaatggtaattgttgctaatcttcttatgcaatttccttttttgttattattacttatttttgacagtgttgaaaatgttcagaaggttgctctagattgagagaagagacaaacacctcccaggagacagttcaagaaagcttcaaactgcatgattcatgccaattagcaattgactgtcactgttccttgtcactggtagaccaaaataaaaccagctctactggtcttgtggaattgggagcttgggaatggatcctggaggatgcccaattagggcctagccttaatcaggtcctcagagaatttctaccatttcagagaggccttttggaatgtggcccctgaacaagaattggaagctgccctgcccatgggagctggttagaaatgcagaatcctaggctccaccccatccagttcatgagaatctatatttaacaagatctgcagggggtgtgtctgctcagtaatttgaggacaaccattccagactgcttccaattttctggaatacatgaaatatagatcagttataagtagcaggccaagtcaggcccttattttcaagaaactgaggaattttctttgtgtagctttgctctttggtagaaaaggctaggtacacagctctagacactgccacacagggtctgcaaggtctttggttcagctaagctaggaatgaaatcctgcttcagtgtatggaaataaatgtatcatagaaatgtaacttttgtaagacaaaggttttcctcttctattttgtaaactcaaaatatttgtacatagttatttatttattggagataatctagaacacaggcaaaatccttgcttatgacatcacttgtacaaaataaacaaataacaatgtgctctcgggttgtgtgtctgttcacttttcctccctcagtgccctcattttatgtcattaaatggggctcacaaaccatgcaaatgctatgagatgcatggagggctgccctgtaccccagcacttgtgttgtctggtggtggcaccatctctgattttcaaagctttttccagaggctattattttcactgtagaatgatttcatgctatctctgtgtgcacaaatatttattttctttctgtaaccataacaacttcatatatgaggacttgtgtctctgtgcttttaaatgcataaatgcattataggatcatttgttggaatgaattaaataaacccttcctggggcatctggcgaatcccaaaaa

SEQ ID NO: 1996 - protein, 681 aa, Homo sapien
MREGGRKGGQRTQQSEYAASALPTRHFLPFPERPGREGRALINSSPGRSACQRLPRRGCAQRQEVSGLGRTGEAVAIGVPVPLCSGTALSQCPRFPRRLHAARLGNMLGVLVLGALALAGLGFPAPAEPQPGGSQCVEHDCFALYPGPATFLNASQICDGLRGHLMTVRSSVAADVISLLLNGDGGVGRRRLWIGLQLPPGCGDPKRLGPLRGFQWVTGDNNTSYSRWARLDLNGAPLCGPLCVAVSAAEATVPSEPIWEEQQCEVKADGFLCEFHFPATCRPLAVEPGAAAAAVSITYGTPFAARGADFQALPVGSSAAVAPLGLQLMCTAPPGAVQGHWAREAPGAWDCSVENGGCEHACNAIPGAPRCQCPAGAALQADGRSCTASATQSCNDLCEHFCVPNPDQPGSYSCMCETGYRLAADQHRCEDVDDCILEPSPCPQRCVNTQGGFECHCYPNYDLVDGECVEPVDPCFRANCEYQCQPLNQTSYLCVCAEGFAPIPHEPHRCQMFCNQTACPADCDPNTQASCECPEGYILDDGFICTDIDECENGGFCSGVCHNLPGTFECICGPDSALARHIGTDCDSGKVDGGDSGSGEPPPSPTPGSTLTPPAVGLVHSGLLIGISIASLCLVVALLALLCHLRKKQGAARAKMEYKCAAPSKEVVLQHVRTERTPQRL

SEQ ID NO: 1997 - DNA, 512 bp, Homo sapien
tgcggccgccctctgctgcgcctgaagagagaggcgactctacaagcctcacagcatgcactgttactaaaaagacgatgcgtcctcctggacctgagatctgtgtgatcgtgggaaagcgacgaaaaacgaacaaaggaacagtaaatggagtaacttggctagaatatggcagtaactacaaggcatgttctgctctggcacgccaggagctttaagtgatggaaatatgcgagtcaatcagtggatggtgaacaaaggaacagtaaatggagtaacttggctagaatatggcagtaactacaaggcatgttctgctctggcacgaagacaacccacctgaggcaccagacacatgagtgaagccatcttggacatcccagtcacagccaaactcactcctgagtgcatctgcatgatgaacccagcaatccccaccatggagcaaaggatccatccagtcaacccaaagaatcgtgaaaaataataaattgttgttttaaagttcaaaa

SEQ ID NO: 1998 - protein, 71 aa, Homo sapien [sequence omitted]

SEQ ID NO: 1999 - DNA, 975 bp, Homo sapien
gctaagttgccatgacatgtagatttaaaagataaacataaaaataacttatatttattatcagtcatggattccaagattatttatgagaacttccaatatacctggcccaggaagaatatggctcctaacttaggggatctcaccagccaatgggaaagactaagcagatgtgtttactggcaatacattctgatgagggacacctaatggtgagtagagggtgcgacggctcctagaaagagtcaaagattagagaagttcatcaggaaaaaacgataaagtttccatcaggagaatacaccctagtaaaggctcaaagtctaaagagtttaaggacttctagggactgaaaaaattctgtataacaggagggaaggtgggtgtggaagaatagccaagaaggaaaaatagccaagaagtcagtggaaggaacattgcatcataggccttgctgagaaattggaatgaatgacagtatttgaataacgctttgctcagttctgtagtttcgattcgaaatgcagacttaaaaagtcgatgaacattcagacatttctctttaaacaagacttccccttctattctttagagttggaaattattctctgcttgggaatagttttcaatatgttccagacattataaatgacttcccttctatttccatgtatttcccatgttgattacagccaggctgatcagagtaaagcaccaggtgtcatagcatcctaatattatatgaatcatgcatttatccattcatctatgcatgtatccagggaaaacagatttttccccctactttatcggttctacagattcagattcctgtatatttaggtaacattccaaggggatagatgtgctcttataaaagactgcttacttcagcaagacagtttctaaaccctttacttttgagaacaattctccaggtattctcgggggcggtgggggcagaagggaagcaaa

SEQ ID NO: 2000 - protein, 37 aa, Homo sapien [sequence omitted]

SEQ ID NO: 2001 - DNA, 2113 bp, Homo sapien
attccattagattgtaaggtctcaagcataatactctttggctcagtgctctatcctctgggcccactggagtagcagccccacctccttggccctgagcggcagttctgcccgctggaaccaaggaggaaaccacctcaccctacccaaggcttgtttttcctttgtgaacatcgttctacaatgctgtgggtacatcgctttttcaatatgaagttttctttggaagtttataaatccagtttgggccttggaggaaagcagtcagtgatagaaattttgtgactctgagtgagtttggtggagcttcgagttgtagattgtttcccagggaccgctgcagacacaaagccctgactgcaggatccccagtgataaaagtgatcaaaggcgagtgtgatcagacgtgcgctgcaacgcgagttgaggtttcatcgagcctcattcagtggctcctggggcagttgtgtggatgaagagggccatgtctgtgaagtgctcaggatggagctggtggtggggcggccatgccggccacatggctcacacccctcacccgtcaactcggtgcccggcattttccttagctcctctgtggattaattctcattctgaagacgggaggctgaggtttcatctcagctctgttcctggctcattgctgcgcttctctgtacccgtcccctcccctgactaggggaatgagaaccttgcctatggaaacacttaggggatggtggcccgtgactccatgccagcccctcccaagcccagccaccagctgaggtcctgaccaccttgtggaccacccggtcctccagccctgcgcccacccccgcgtcctccctcctgctctttcgtagttcccttgtgtttctctgtgccagtagctgagcccccgtgcccacccactgcaactgcaccttccctccctccaggcttccccactgcgttgctcccctgcaggggccagtgagtggctctagctgtgttcagacagctctgtgcctcctcctcccaccccagttcctccgccttggagacagacgggggtgcagcggggctgaatggcactccaagctcgtggggctggggagtccacatctgcacccgccgcgtggctagcaccccctgagcgttttggtcaatttgccatcatcccacccctcagtgccgttggtggttgcctgacgaaaagctgcacttaatagaaatcactgtggatgcaggagatggacggtgatgagctcaggaccagccagcaaccccatcaggcggtaatgcctaccatggtcacccatgacttcctctcgccactgctcggagctcctgcaaagccacaggcaacaacacatttctgctccgtacgagaagctcctattgtaagtcggtgacatggctggggttttctctcagcaaatattgagcaaacactgactgtgccaggtgatgtgctgggtcccaaacccttcccagacccagccctggcactcacggagatccagctaggaagtccgggaaaaggtcatcggggaaataaacaaagtcaagcacagtggatgaacgcgctgctgccgctccccacacctcttgtggtggacatcacttacgcttcctcatggtgcatgtcacttatgcttcctggtgccctcccagatgacccccccttgggccactacacacagctgcacccggcaagagcagacaaggatggtctactcactgagcctgcaaggctggtgtgcaggacaggccagctacactccccaggtgtgtgcaagaccggggacgagtcagtcattgggaggtgaggtgctcgggcagtgtgggatggaggaggagggagggaaactgagtgtgggctcttcgtattggagaggaggggacggccatggcacaaagactcagatgggaaagtgtgagaaagcagagatttcaaaggagctacggtggagacccacagaagaggaatgctgaggcttttctgtctgaaatgctgaatagactctagcacacgcaaaacagcccaccacagcgagctgcaggattcttccgggcttttaacagtggtcttgtaaaaaaaattagccgggcatggttgtcccagctactc

SEQ ID NO: 2002 - protein, 106 aa, Homo sapien
MTPPWATTHSCTRQEQTRMVYSLSLQGWCAGQASYTPQVCARPGTSQSLGGEVLGQCGMEEEGGKLSVGSSYWRGGDGHGTKTQMGKCEKAEISKELRWRPTEEEC

SEQ ID NO: 2003 - DNA, 1135 bp, Homo sapien
gggggtttttgctagaaaagcactcctggagcttgccaccagcttggacttctagggactttcctctcagccaggaaggattttgatattcatcagaaatacctccagaagattcaaggagctgtagaggtgaagtaagcctgtgaaggaccagcatgggaatcctatactctgagcccatctgccaagcagcctatcagaatgactttggacaagtgtggcggtgggtgaaagaagacagcagctatgccaacgttcaagatggctttaatggagacacgcccctgatctgtgcttgcaggcgagggcatgtgagaatcgtttccttccttttaagaagaaatgctaatgtcaacctcaaaaaccagaaagagagaacctgcttgcatcatgctgtgaagaaaaaatttaccttcattgattatctactaattatcctcttaatgcctgttctgcttattgggtatttcctcatggtatcaaagacaaagcagaatgaggctcttgtacgaatgctacttgatgctggtgtcgaagttaatgctacagattgttatggctgtaccgcattacattatgcctgtgaaatgaaaaaccagtctcttatccctctgctcttggaagcccgtgcagaccccacaataaagaataagcatggtgagagctcactggatattgcacggagattaaaattttcccagattgaattaatgctaaggaaagcattgtaatccttgtgaccacaccgatggagatacagaaaaagttaacgactggattctatcttcattttagacttttggtctgtgggccatttaacctggatgccaccattttatggggataatgatgcttaccatggttaatgttttggaagagctttttatttatagcattgtttactcagtcaagttcaccatggccgtaatccttctaagggaaacactaaagttgttgtagtctccacttcagtcagaaactgatgtttcagctaggcacagtggtacatgcctgtaatcccagctacttgggaggctgaggtgggaggatcacttgaactcaggagtttgagagcagccagggcaacacagcgagaccctgtcccaaaaaaaaaaaaaaaaaaaaaaaaaaaaaa

SEQ ID NO: 2004 - protein, 191 aa, Homo sapien
MGILYSEPICQAAYQNDFGQVWRWVKEDSSYANVQDGFNGDTPLICACRRGHVRIVSFLLRRNANVNLKNQKERTCLHHAVKKKFTFIDYLLIILLMPVLLIGYFLMVSKTKQNEALVRMLLDAGVEVNATDCYGCTALHYACEMKNQSLIPLLLEARADPTIKNKHGESSLDIARRLKFSQIELMLRKAL

SEQ ID NO: 2005 - DNA, 3001 bp, Homo sapien
  Unsure 2396-2432: Unknown base
gtatgtattagaattttctttgagatttcactccttttaaaaatgacgtcaactcctgggttaggaaagcaagatgagggaataagtgtcctaagaaactcccatcccaagccagacagatgcctacccgtggcctggcaaaggtcctgggatctcaagctgatgcaagcaatttgtgtacaccaaggcaaggggtctcaatcctgcagagaaacccatgagatgaggcagacagcagattttcacttgatcaaacacttgctgctctcaacccctctttgttttcccatccaaaatctggacctctgtttaggcgcaagacagtgagtaagagcagctccaaaagatgacgtatgcaaggggaactcttctgttcaatcctgtaatgttttctgttagagacagcataggctacctatcctaatcctgcaccccaactgttaagacagaagggaaaagtacaatgttcatcaatcatagctctgggatgctgcagctccctgacctgggcccctacttgagctaggagaagaacacctcatgaaaacagtctacctatagtcaggacttccccaaggcagactttattttttggtccatcgatcttggctctcactgttctccctgcttcccacccccaagctgcctctgcatgtgggctcagaagtcatcatctaaagaattccattgctcacctcctgcatagcagcacagccccatgaggccacacaccagatggaggggataaaagtacgaggtcatggcttcttgcaagaggctttttcttaaactaaccctgactcctggaaaagaggcagagcaggagagtgttgaatgagctgctgatgacagcagcttcataggtcttgtgtataaaggaaggaaaaagctaacttggctttccgtggaaatttacctactcccattttcaggtctactcctggtctcacatctacttcttgaaggtgtctaagtagaatgcagagattgtcaagctagagggttaactccttcccaattgtagggatctattcagcaggctgccacacacatgctgaggtggaggccaaccctgaacacatgcgctgcttctttaggaatgtaactatgaagtaaaaggaaacagtaaggaaggtgaactggaactctggggaaactgaaaaggtcatcaataggccttcaaaatatttgtgtgtaataagtagacacaagaggctggaggaagatgatcattcctagaataattatgcttactgggtgacaatatacagaagcaacaattacaataaaatgaaacagtttaatggactaggaagcagaagtctgagaataaaggaattaggttaatgagattaagcagagatggcattccacaggaggtgacttttgagttgaatttttaaaagatagctttatgtgttttatgaactgactgagggcagtcagaagaaggcattctaaatagagggaactggtatgtgctgaaacttagaagcaggaatgtacaagcaatatataaggaatttcaagcaagtacacattatatacactggggaatacagagaaattagaatgctgagatcagggcttaaataatgtgaggtgactgtgtgcacctagactgtcaaatggttcagcatcccctatagagccacatagtatcttgatttatgtcagtaaacatcagggcacctatggaaaagcacaaggatgagtccatttgttacagacccagggactaacagagatctacactgtaaagttcaacaaaatgctacatatcattaactacagctccttatcatttgagattctgggctaagtaagagatatcaaatatcctatccagtactgtgatacattaatgtaggcttacaggcccagaacctggcataaatcaagccaaacccttaagaaattagaatgtgaaaagaaaataatttaaaatagaaaatacatgctgcttttcctcactcccaaacttaaaacttgactggtcctacatattctacttggtatattgaatttttgcagctagcagatttatcgtatctgaggccatagtgaatagaagagctgcaaaagagctttagagactgcaaaaccagctcactaataaatgaggaactttattctaatttactaccaggggctgaagtagcagccaaagaaggagacaaattctaacttcatgatctctagttaggtgtctattttcctgcatttgctaaaggtaaaaatcgctacttatggggcttttgtcatacttcttaaccaaacttccctaacttctgaggataaaaaccataagggcaatcttattcttccaaagcagttccctggtgccactttcagaaacagagtattgaactatgggtctgacccagtgtggcacnnnnnnnnnnnnnnnnnnnnnnnnnnnnnnnnnnnnnacactgaataagccaaaacgtgtgccatattctaggtttctgctttacttaactggcaaaatttggtgctgtaagggaggcagccacaaaaccagtgatagcatttgttagtatcatcttagttctcttccctcccctaggtagtttataaagggtgatttctgaaacccttcacaaaagaaaagctcaagggtttacattcaactgtgacagcactatgaattcattaagaagcatgtttcaggttgcactgtaatttccctatgtaatacaaacccatggaatctgacataagctgattgctcatgctggttgttttatttacatttctgaatggaaaggatttcaatactcataaaatatctaactggcttatttttcatctgttctcccagagaagctattataagataggcatagagacagaagtctcaacttgtataactggttaagcaaccagggaaatgttattgctcaaaatgcaattttaaaaaattcaatatggaacttgaggccaaaaaaacagaaggttactctcaatgccatccaaaagataaaagttaaaaaac

SEQ ID NO: 2006 - protein, 108 aa, Homo sapien
  Unsure 2396-2432: Unknown amino acid
VCIRIFFEISLLLKMTSTPGLGKQDEGISVLRNSHPKPDRCLPVAWQRSWDLKLMQAICVHQGKGSQSCRETHEMRQTADFHLIKHLLLSTPLCFPIQNLDLCLGARQ

SEQ ID NO: 2007 - DNA, 1046 bp, Homo sapien
gaagaagaagaccacaaaagacatgactatccaactttttatgacaaactgcaaggaataaaggaagaataagtccatgtactgtaccacagaagttctgtctgcatcttggacctgaacttgatcatcatcagcttgataagagactttttgactctatatccttgcagttaagaagaaagcacttttttgtaatgtttgttttaatggttcaaaaaaaatctttcttataaagagcataggtagaattagtgaactctttggatcctttgtacagataaaggttatagatttcttgtgttgaatattaaaaaagcaaggatgtctaaccattaagattatccaaagtcaggcgtgagccactgtgcctggccccaagttttgcatcttttaatgccctctgaacaaatacatagagaaaactctcagaacaattaaaacctgcagagcaacagtgtcctccatgtcttaggtttcaagtttgcctctaaaattctaatccatatttttctacttctcagataatttatgtgtgtgtactcttcctagacgtacaagagactttttaatgctaaatatttgtcagtgcttaacaaaaactcaatttcacattactcatattgtttttgttttaattgaatgtgaattaaatttttattagttatttgatttggaatgttatgtatgccattaacactattaggggaatctctagcatttctgtatttttaaagaatttgattcttttgtagattctgcctgtgtggtcattttaaaacatgtgtgacatatatcagtaccttcattcttctatattttgtgtctcctccaacctccaactttttttgttttttgaaaaatgtttctctaacacctcaacagtttaaggtaatttagtacacatatatcagtatttttgtgatctgaaaaagcaacccattttctaaattcatatttttcctaaaactttactatgtttttattttaagaggtttcctgttatatacactttttacacatgcaaataaactttataccaagtgagt

SEQ ID NO: 2008 - protein, 8 aa, Homo sapien
MQINFIPS

SEQ ID NO: 2009 - DNA, 979 bp, Homo sapien
  Unsure 705, 708, 712, 715-717, 724, 726-728: Unknown base
atggagtcttgtttctctgacttatagatcttttctcaccttgtcacagagttttaaacaaaccctgtctcagaactgtctctggaaaaatgtttagggactgtcccatgagtgaattatggactaagattagtagatttgaagtctaaacaccagaagcctccaaataatggaatttgtttaaaaataaatattaaaaaataacctgaaaagaaatcacaccccccttccctcccctggccccatttcttaatctgcaatagaaaaagaaggtcagaaaatgcacctagaatattctggagcagaatcaatttttttgtttttaaaaccactgtgtgaatatgaacaaactattctgggtaaattctcttcctccattaaacttgggaccccagattggctgctctccttttgggtgggtggatggtgggaatgcatgactaagagctgttgctcatattagaaatacatgtctcagactttctgtggttatttttgctttattccaatacctagctgcataatacatctaaaatctatgggagtagcttccagacatgagtatttttcgggaactcttcagatgcctgcacacccggtaagaaactctactctagagaatttatgggtcgactgttccagaagcctcaggagtacagttctgccttttccttgatgctgtttgtagaaagaattggaaaacanccnaaangannngaatagnannnacaaaaaaaaagaaatacaatctgccaaatgccttttatgtcaaacgcatttttttctgatctgagaagttttgaaaaagtatagcaattaattattaatatttgccaatgactcacctttactgagattaaaattaatatgaatttattttagaaaactccctatgagtggctatcaaaatattctatgggttatcaaagaaggcaatatcaacaatagtggataggctttaatgacatttttttaaata

SEQ ID NO: 2010 - protein, 31 aa, Homo sapien
  Unsure 705, 708, 712, 715-717, 724, 726-728: Unknown amino acid
WSLVSLTYRSFLTLSQSFKQTLSQNCLWKNV

SEQ ID NO: 2011 - DNA, 1639 bp, Homo sapien
atatatatatattctactatatagtcatatagtagcattttttttttatagctttctttggagttcttggtcttagtgtctaaaatagtggccataaaggaatttggaagttaagtgttcttgctgacccaaagaaaaatcagatgtttctgtttaggacactgtatgtgacaaacaaggaagtttttattaatttatttttttgaagaagaattgatgagagaataatgagaattcctccaagattaaaagtaaattataagatcctgtgctattttaatgtaagccaacatttgaatttaatttgacttctattttcagtaaattagagtgaaattttagggatgtctttatctcctatagtgtgtgttttgccaagatttattaagggtaattttggattttagaaaatgtacagtttctaaaggcttgtgaacgttttatattgatagaaaatgtaagtaagactagtaacacattattttctccaaaggatcctgtgactgacacaaaaaatatgatataatattgaatctgccaaaagatgcactgttaatctagggttatgttatgttgttattttattaggtatgtgatactatggtgtgaattttagaatataggtaattatttaagtaattactgtaattctaaacatcttctgagatgtttctctaaagcagaaactcagcttttactcatgtttagataatgtgatatagctgttctagatatttgagattagggttgaggcaaattgttgacatataattaaaatgtattttataactaaaatttagaagaatggaaaaagtttacattgtatttataagactttgctaacatgctttatgacattacggagaagtactaggaagaaggagatctttaaaaggagtgatattctgtttgctttgctggagtaccttatcaggaaatttgaaatcttagccctttaattgtgatatctgttaattctaaaacttacactgaatttaactttgaaggtcaacatatggatttttttaaaaacaatatttactctatcaaaagattagttgtatttttgacttgaggaaatagcttaatctgaacagcacgaaacttgacaaaaaagtttgctaatacataaatattggctattttaatctgttgaaaacggaaggctagtaccaagggagacggtagtaaaattatagaaggagctagtgaaaagtaaacattatgcaacatgaaaagaatactaggggaaaaactgacagagtagaataacaggaagattagtcacttctggaaggaaaaaagtaggtaggggcagggggatgaagtactttaaacaggaatgtggaactggaagtgctagggctaaaagacagatgtgagcttatttgggagctaaactgggctttgaaaaaggaataatactggtagcatttaatatcaaaatttaaattttatgttaacaataagaaaaaaatggagaaaaatttttgttagggattataaaatgcctgttaaaataaaaagacttatatttactcctttgtggagctgaattggtttcggtcagacagcaatgtcaaatgcaaatcaagaaaatacatttctgaggccaaggcaggagatttcttgaccccag

SEQ ID NO: 2012 - protein, 60 aa, Homo sapien
MLTIRKKWRKIFVRDYKMPVKNKKTYIYSFVELNWFRSDSNVKCKSRKYISEAKAGDFLT

SEQ ID NO: 2013 - DNA, 743 bp, Homo sapien
  Unsure 718: Unknown base
gtcctgawcaccgcactcctcatcgtcctcacctaccctgcctggaccttcatcgactgcctggactcggccagccccctcttccccgtgtgtgtcatagttgtgccattcttcctgtgttacaattaccctgtttctgattactacagcccaacccgggcggacaccaccaccattctggctgccggggctggagtgaccataggattctggatcaaccatttcttccagcttgtatccaagcccgctgaatctctccctgttattcagaacatcccaccactcaccacctacatgttagttttgggtctgaccaaatttgcagtgggaattgtgttgatcctcttggttcgtcagcttgtacaaaatctctcactgcaagtattatactcatggttcaaggtggtcaccaggaacaaggaggccaggcggagactggagattgaagtgccttacaagtttgttacctacacatctgttggcatctgcgctacaacctttgtgccgatgcttcacaggtttctgggattamcctgagtctcaaacagttggaaactagcccactggacatgaaagccaagacataggaaagttattggtaggcaaatcttgacaacttatttttctttaacaacaacaaaaagtcatacggctgtcttgctactaccagataaatgatgctgctgtgtgaaaggaaaaaaaaaaaaaaaaaaactcnagggggggccggtaacaaattcccc

SEQ ID NO: 2014 - protein, 178 aa, Homo sapien
  unsure 3, 178: unknown amino acid
  Unsure 718: Unknown amino acid
VLXTALLIVLTYPAWTFIDCLDSASPLFPVCVIVVPFFLCYNYPVSDYYSPTRADTTTILAAGAGVTIGFWINHFFQLVSKPAESLPVIQNIPPLTTYMLVLGLTKFAVGIVLILLVRQLVQNLSLQVLYSWFKVVTRNKEARRRLEIEVPYKFVTYTSVGICATTFVPMLHRFLGLX

SEQ ID NO: 2015 - DNA, 966 bp, Homo sapien
cgcgcagggcagcattagcactcttaaatagtattctgaccctcaaaagtgttgatttaatgaaagatcaagatgattcataaccagatgccactcttattcatagtcttcatgttggcttttatttggggcaggaaaaaagaaacaagaaaaacaaactcccacttaatttttccctaattattatttccagatgaatttatcttctgaataaaggaatttattgtctcaatttcctgtcttactgggcattatgttgaatttcactgactcttttcttatgtcactctcctagctatttattttgtttagacacaatactctgaacaaacctaaatctgacattttagaagcaagaatacaatttttggggggaaattagagttactaatttaactgggtcatagagatgtattattactgtgatttctaaagaagattatgttttctttgaattgtgctcttttcagattttgagatttttaataattcactggaagtgtgacatagatgtatcaaagggagcattgctagaagggcagctagtgatttccatagaaggattaaattctaagcaccaggcaaatgctcttcattgtgtaacaactagtaagtagagaaagaaaaaatattttctatctcttttgtcatggtttatgtcgtagcttatttaaaaatttcaattagaatcttttatcatgttattccaggattgttccataattataaaatgaaatgattatgtaataagtgtctggtggtagatttacaaatgtatcatacaggaaaggtgagtagttgaatgactcttaccatagattatttattttactggtttaagttaaaattgctcagaaacaatcttatttttctcttgattttaatctactttgtcacagctaaattatattacattgagctttacctactttttttttcccaagtctaaattttggcagtagcaaa

SEQ ID NO: 2016 - protein, 48 aa, Homo sapien [sequence omitted]

SEQ ID NO: 2017 - DNA, 492 bp, Homo sapien
cacaccacctgagtccacttttcatactttctaaaacaatatttagggatttttgtgttagccactctcctatctcatttctccaattgaagtaatgcataaatcttccattctcttttttctctcattcatggatagaatgaatgtctataatgaaaagagcttcttatcaatagccctctcagatttgttctgaattttgccaaatatttgtataactctgcaaaagactttctttccctgccttctcctttagagggaaaaacaaactgtaggtgtgacagcttacctcctagcattgttgtgaggtttggctggcacaagataaagtgctgtgtaattactctgaaatgtttgtaattaataaagaaatgaattgtaggcactttgtcagtagaaaccactgtgatttggaaacgcaatgtttcaataataaagactataaaatttaaaaaagaaaaaaaattaattctctccaaattataaattaaa

SEQ ID NO: 2018 - protein, 30 aa, Homo sapien [sequence omitted]

SEQ ID NO: 2019 - DNA, 5093 bp, Homo sapien
aggtgacagctggagggaggagcgggggtggagccgggggaagggtggggaggggatgggctggagctccgggcagtgtgcgaggcgcacgcacaggagcctgcactctgcgtcccgcaccccagcagccgcgccatgagccggagtctcttgctctggttcttgctgttcctgctcctgctcccgccgctccccgtcctgctcgcggacccaggggcgcccacgccagtgaatccctgttgttactatccatgccagcaccagggcatctgtgtccgcttcggccttgaccgctaccagtgtgactgcacccgcacgggctattccggccccaactgcaccatccctggcctgtggacctggctccggaattcactgcggcccagcccctctttcacccacttcctgctcactcacgggcgctggttctgggagtttgtcaatgccaccttcatccgagagatgctcatgcgcctggtactcacagtgcgctccaaccttatccccagtccccccacctacaactcagcacatgactacatcagctgggagtctttctccaacgtgagctattacactcgtattctgccctctgtgcctaaagattgccccacacccatgggaaccaaagggaagaagcagttgccagatgcccagctcctggcccgccgcttcctgctcaggaggaagttcatacctgacccccaaggcaccaacctcatgtttgccttctttgcacaacacttcacccaccagttcttcaaaacttctggcaagatgggtcctggcttcaccaaggccttgggccatggggtagacctcggccacatttatggagacaatctggagcgtcagtatcaactgcggctctttaaggatgggaaactcaagtaccaggtgctggatggagaaatgtacccgccctcggtagaagaggcgcctgtgttgatgcactacccccgaggcatcccgccccagagccagatggctgtgggccaggaggtgtttgggctgcttcctgggctcatgctgtatgccacgctctggctacgtgagcacaaccgtgtgtgtgacctgctgaaggctgagcaccccacctggggcgatgagcagcttttccagacgacccgcctcatcctcataggggagaccatcaagattgtcatcgaggagtacgtgcagcagctgagtggctatttcctgcagctgaaatttgacccagagctgctgttcggtgtccagttccaataccgcaaccgcattgccatggagttcaaccatctctaccactggcaccccctcatgcctgactccttcaaggtgggctcccaggagtacagctacgagcagttcttgttcaacacctccatgttggtggactatggggttgaggccctggtggatgccttctctcgccagattgctggccggatcggtgggggcaggaacatggaccaccacatcctgcatgtggctgtggatgtcatcagggagtctcgggagatgcggctgcagcccttcaatgagtaccgcaagaggtttggcatgaaaccctacacctccttccaggagctcgtaggagagaaggagatggcagcagagttggaggaattgtatggagacattgatgcgttggagttctaccctggactgcttcttgaaaagtgccatccaaactctatctttggggagagtatgatagagattggggctcccttttccctcaagggtctcctagggaatcccatctgttctccggagtactggaagccgagcacatttggcggcgaggtgggctttaacattgtcaagacggccacactgaagaagctggtctgcctcaacaccaagacctgtccctacgtttccttccgtgtgccggatgccagtcaggatgatgggcctgctgtggagcgaccatccacagagctctgaggggcaggaaagcagcattctggaggggagagctttgtgcttgtcattccagagtgctgaggccagggctgatggtcttaaatgctcattttctggtttggcatggtgagtgttggggttgacatttagaactttaagtctcacccattatctggaatattgtgattctgtttattcttccagaatgctgaactccttgttagcccttcagattgttaggagtggttctcatttggtctgccagaatactgggttcttagttgacaacctagaatgtcagatttctggttgatttgtaacacagtcattctaggatgtggagctactgatgaaatctgctagaaagttagggggttcttattttgcattccagaatcttgactttctgattggtgattcaaagtgttgtgttcctggctgatgatccagaacagtggctcgtatcccaaatctgtcagcatctggctgtctagaatgtggatttgattcattttcctgttcagtgagatatcatagagacggagatcctaaggtccaacaagaatgcattccctgaatctgtgcctgcactgagagggcaaggaagtggggtgttcttcttgggacccccactaagaccctggtctgaggatgtagagagaacaggtgggctgtattcacgccattggttggaagctaccagagctctatccccatccaggtcttgactcatggcagctgtttctcatgaagctaataaaattcgctttctaaagttacctgttatatatctcttttggtcccatcctctaaagcagaggcaacactggaacatggctagcctttcttgtagccatggctgggcgtgctagaggttgcagcatgagactttctgctgggatccttgggcccatcactgtatagacatgctaccactggtacttcctttctccctgcgggccaggcactgcccttttcaggaagctctcttaaaatacccattgccccagacctggaagatataacattcagttcccaccatctgattaaaacaacttcctcccttacagagcatacaacagagggggcacccggggaggagagcacatactgtgttccaatttcacgcttttaattctcatttgttctcacaccaacagtgtgaagtgcgtggtataatctccatttcaaaaccaaggaagcagcctcagagtggtcgagtgacacacctcacgcaggctgagtccagagcttgtgctcctcttgattcctggtttgactcagttccaggcctgatcttgcctgtctggctcagggtcaaagacagaatggtggagtgtagcctccacctgatattcaggctactcattcagtcccaaatatgtattttcctaagtgtttactatgtgccagttcctgtaacaggtgtggggacacagcagtgagtaatcaatacagacaaggttctgcccttatggagctcacactccagtggcagacaaacagaccataaataaggaaacgatgaaataagatatatacaaggtgagtgtgacttcccttctaaccccctctgctctgtcctcccctattgcgctctcaagaccagagacccaacagcagtgatctcagggcagacagccctccactccagctctgagacccttttctcaggacctctgtaggcagcagagagagaggacagaggggtaagatgaggggttgagggaaggttcttcatgatccacactttgggcttagtatttctcaggaagagctatggcccagaaacaacaggggaaactagagttcggtctgacagtccttggggttaagtctcctgtcttatggtccagaaactcctgtttctccttagttggctggaaactgctcccatcattccttctggcctctgctgaatgcagggaatgcaatccttccctgctcttgcagttgctctgacgtagaaagatccttcgggtgctggaagtctccatgaagagcttgtgtcctgtcctttcttgcagattctatttcccctcttctgctaatacctcttactttgcttgagaatcctctcctttcttattaatttcagtcttggtggttctatcaggggtgcattctggccaaggggtgggcctgtgaatcaatcctgggcaatcagacaccctctccttaaaaactggcccgtggagactgagatcactgactctgactcatccccacagctggctctgacaagatggtccatttgttcctgcttccgagatccccagggcagcctggatccctgcccttctcaagactttagcttttccttccatccggtggcctattccaggaattcctcttttgcttaaatcagttggagtttgtgtctgttgcttgtaatcaagcctttatggctgctgggctgagtgacacaagcactttaatggcctggagggacttttaatcagtgaagatgcaatcagacaagtgttttggaaagagcaccctcgagaagggtggatgacagggcagagcaggaaggacaggaagctggcagaacggaggaggctgcagccgtggtccaaccaggagctgatggcagctggggctaggggaagggctttgagggtggaaggatgggatgggttccagaggtattcctctcttaaatgcaagtgcctagattaggtagactttgcttagtattgacaactgcacatgaaagttttgcaaagggaaacaggctaaatgcaccaagaaagcttcttcagagtgaagaatcttaatgcttgtaatttaaacatttgttcctggagttttgatttggtggatgtgatggttggttttatttgtcagtttggttgggctatagcacacagttatttaatcaaacagtaatctaggtgtggctgtgaaggtattttgtagatgtgattaacatctacaatcagttgactttaagtgaaagagattacttaaataatttgggtgagctgcacctgattagttgaaaggcctcaagaacaaacactgcagtttcctggaaaagaagaaactttgcctcaagactatagccatcgactcctgcctgagtttccagcctgctagtctgccctatggatttgaagtttgccaaccccaacaattgtgtgaattaatttctaaaaataaagctatatacagcc

SEQ ID NO: 2020 - protein, 599 aa, Homo sapien
MSRSLLLWFLLFLLLLPPLPVLLADPGAPTPVNPCCYYPCQHQGICVRFGLDRYQCDCTRTGYSGPNCTIPGLWTWLRNSLRPSPSFTHFLLTHGRWFWEFVNATFIREMLMRLVLTVRSNLIPSPPTYNSAHDYISWESFSNVSYYTRILPSVPKDCPTPMGTKGKKQLPDAQLLARRFLLRRKFIPDPQGTNLMFAFFAQHFTHQFFKTSGKMGPGFTKALGHGVDLGHIYGDNLERQYQLRLFKDGKLKYQVLDGEMYPPSVEEAPVLMHYPRGIPPQSQMAVGQEVFGLLPGLMLYATLWLREHNRVCDLLKAEHPTWGDEQLFQTTRLILIGETIKIVIEEYVQQLSGYFLQLKFDPELLFGVQFQYRNRIAMEFNHLYHWHPLMPDSFKVGSQEYSYEQFLFNTSMLVDYGVEALVDAFSRQIAGRIGGGRNMDHHILHVAVDVIRESREMRLQPFNEYRKRFGMKPYTSFQELVGEKEMAAELEELYGDIDALEFYPGLLLEKCHPNSIFGESMIEIGAPFSLKGLLGNPICSPEYWKPSTFGGEVGFNIVKTATLKKLVCLNTKTCPYVSFRVPDASQDDGPAVERPSTEL

SEQ ID NO: 2021 - DNA, 1331 bp, Homo sapien
atattatatatatatgtctataacatatagacagagaagataataatatattcattttatagtttaggaaacagacttggaagggcaaataacttgtctaagatgactaagcagctgagtgagaaccacagcctatctgtggcattcagtttcagccatctttcccttgcttcataaggatagttactctggtatcagttgctggattgggattttgggcatttataaatgtttttattttggatattactgaatcacagacaatttcatcttagttaattaaaaattcatcttacgtgacacttgtctaaatcttaaaatattaaaattttaatgtataaggatgttaataatctttatattttaagagactatgaagtcaagtctagctaacttagatctgtaagtttttagctatggaaagcaattctattgtgtacaagtttcagcctgtgaagggaattcattgaaaatgtatagagatcagaagaactaacacctttcttgcatggatttttcttgattattggcagttaacaataaaatgttattagatcactggtgcttctgtgtggggttgagttttttatgatatcttctgttagacccataagggaggctgtgagttgttttctacatccttggaatatataagatcctcttttaaaattatattttatataagcacatgaaaatggaatgaaataatgaattgacataggaattacctacatattttggctgtacatttagtgcacaaaatatcccttttttgaatgccaaatggccaagtgtgaaaaccaatatttgttaaagctggagcagaagtcggtatcatcatcatagagtaaacttctggcatatgtgaagatatgaaatgttatccctgaagttattataatttattctcagaaatattagtaatcttattttaagagtaggacattatagtgcagtaatgataattttctcagtgctgcctgttgctagattgttcctatgattgctgtcatgcacatacagacactaaattgagggtcactttccactgaagttagtggaatacaaaataggtggaggaactttcttcctctaacgtctttatatgtgtctgtgtttatatatacgtgtatgtatataaatatgtatacacatatataatatctggagcaaaaatgattatgttgtaagaacttttggaggttttcctcctcgtaaaattccgaagtggtagagttaacattctgcttttaatttatctacaaaaacatgtgaagaatccccaaataagattttctcatagaagattcatggattttgagtctcagaaa

SEQ ID NO: 2022 - protein, 6 aa, Homo sapien
MDFESQ

SEQ ID NO: 2023 - DNA, 517 bp, Homo sapien
tcctggccgaaatctgttttaagtatagaacatcatgaaattggattctgttgctttaagcatttcatgactgagctgctgtctggatgctacctgaagagattctcattgaatatcattatggccagtaagtgttccataattttctttaagctccatctatgtaaatatttttgaacaattttgcacaagtacagggccacatacctatttgttataaacccgacgttgataaaatgcactcttagtataattgggtcttgttttgatcctggcagtttcatattgggatttggcagtgagttcaacagaataagcattatcctcttgaggcccatctaggattgaactaaagggcttctacaatatccacatgatcatacaattagttctctctctccctctcttttttttgtgctgtgatagtgtaactgaatatgagctggttgccagggtattgtggtagaataataccctgcagtaaacagttaatcatgcagcagaactggcttgattt

SEQ ID NO: 2024 - protein, 58 aa, Homo sapien
SWPKSVLSIEHHEIGFCCFKHFMTELLSGCYLKRFSLNIIMASKCSIIFFKLHLCKYF

SEQ ID NO: 2025 - DNA, 560 bp, Homo sapien
aaaagaaaagatttttgttttaggaagctcatattttaagaaactaaaatatattctcatggttgaggacataagacattgttatagaaactaggtcaacttctcaatacctttatcaaagcacctgcagttcccatttcattgcaagtgaagtaaatctcattgaaataaagtagctggtgtatattcagtacacttttaaaatagcctattttaaaagagaaattggtgccaatctgatttatttcctgctttgttggaatgggggaagttctgtaacctcattgctgttctgctctctattgactactttgttaactggggcacagttggcctcttggatgtctaccgtgctgaaggtcagccaaataggcaggtaagactacctaggcctcttcataggcctaactaagatcacagttggaaaaaaaaaagtatagaaaaagaaaagaaagtggttttttttttctaaaatttaacttttggtattcatggaagaaggaagtaaaacatctccattcaaaagaaattggagagtctgtttatgccatacactgaag

SEQ ID NO: 2026 - protein, 30 aa, Homo sapien
KEKIFVLGSSYFKKLKYILMVEDIRHCYRN

SEQ ID NO: 2027 - DNA, 1349 bp, Homo sapien
taaatgttagcaacatacttgggctcaggaaataattgctagtgattgtatttgattagttttttggccattgtacaaagttagttttgagatgggtcactgcgatgtcacggatctcgaggagtctgtgattacaccacgtccatgtcaagcacatagctatgtgttgttgatgttgtccagtagctgtctagatataattgacgggtttctcttgtattcttgagtgagcagagctgaggttttagagcaccacaaaactgtaggaatggagtatcaaaaggttgaatacctgcctcatgaggaaactgggggaaagatgacagggcagattgtggcagaatgtatgtactgaaaatttgggggacgaactatagcaggaagaaaatacataaccagggacaccaaacagttggattttttgtttagtggttgttgatttggcttcaatttagggaatattttgagggtttttattgcttcagtagtttcaaactattttgtgtctatgtaagttggcttttattctcctgatctctcaaactcaaatctcaaaatattgaaaacttctgttatttttccctaaccctaatttaccttcctcaaaatctaatgaattatcaaatcctattgcatcttccttggaatcatcattagttaaactaaaggcaataggaagtgagtttaaaatcctttcttccagagcctgcaggtctgttcatgtgtttataattttcgttttttgtttttttttccatggattcagtggtctcctactggtttattcatgtttggccttgcgcttctcaaattcctttttatacctcatcagcaagtgaacttattccactgccctcatggctagctgtggcctgtgaaatcgtccagattccttgggcagacactcagggtgctttgtatttttgttcggggctgtgttttcagccttactgcttgccgttcccatatgtggactcttgcctgtcgcactgatttctgtcttcccaatccaatgctcatagagatcactaaggataatcctgcttattaagtgatgagttggtttgaattgtctctggtggtagtctaggaaagtgggatttctttttaattttggggttttgtttttgatttgtggtaccaatgaggattttatttgagacagtgtaatgggggccagatgagagaaccattttctttttaagcttagcatggctgggctctagccagctccagatgaaattttggctaattatccctttagaaaagtcaggcttaagcagaactgggctctaggtcaattaaccaaaagccagttcacccaatgaccagttcatttatttaaaaaa

SEQ ID NO: 2028 - protein, 10 aa, Homo sapien
NVSNILGLRK

SEQ ID NO: 2029 - DNA, 1200 bp, Homo sapien
  Unsure 1170: Unknown base
gcttattgctggcaagagggtatagtcctgggaaacaggaaaatatgttgtgatttgaagtgtttctatgttgatgtaatttaaataatcacaacacagataagtttgaagaccacttatataagtatctcaatttttaaaaattctcaaattgttttttttttttgtaattgtaaaatactcaaatttccctggcttatgtttctttagttttattttcattactgtgttacccaggtttgttattcataatatgatgaatcataaaatacagtgatatgactggtataaatgtttctctgtaatttttaatggccttgttttagttattatatgtagttgtttctaaagtgtttgttacagcttatttttgaaacagattcttacattcatgaactagtcttgaagaagacagttctgaaaattttattatcctaatcttttcagtgtactaaaacattactcttatgtattgcagattataaagtagcttatatacaaggagtagtaggtactagggaaatgtttcattttgcataatgaaacattttgcataatgagtggctggattcaatggttttttttttgttccttttgtacagtttggtttcaatgacaaattataaaaatgatattgttcttacatgtgttttgattattttcagtttgtcttgatgtttgtggataatagttaaacttattttcaagtttaaaatattttacaaacttgctatgcaaagtggttttaaaaatctcatttctaagcagttttatttaattatgtatggttcatcaaaatatatgttaacaaaatataagataactgaggaaaattaattgccatttgtgtattccttagtaccagattatcgttgattatgtgtaatggagagagaataaatagctgaaacctaatattcttccagttttttttatgctgccggtttggatcttttttaatcagtccccttttcaaaagtattaccatgtcatgatttgaattgcatttttaaagttttcttatatacatatatttaagatcatagtaaactcccaaatacagtagagggggtaaaatccatatgctaatctgcattagaatatataaagttagatgacctttttaagaatacaaatataggctgggtgtggtggctgacacgtataatncatagcacttctgggaggccaaggcgggca

SEQ ID NO: 2030 - protein, 27 aa, Homo sapien
  Unsure 1170: Unknown amino acid
AYCWQEGIVLGNRKICCDLKCFYVDVI

SEQ ID NO: 2031 - DNA, 797 bp, Homo sapien
atgacttctgattatacttagaatagaatccatcttcttaccctaatttgcgaagttctgcatgacatatgccttctgcccaccttgctaaacttcgttttactttgcacatcctatcatcctgcgttaggatgaccagctctcccaatttgttcaggattgagggccttctaaggatgtaggactttaaactttaaagctaggactgttccaggcaaactgagatatgtggtttccctatcctccagacatggatcatctttgttactttcagcatctcctcttcaggcatatctctgcctgaaatattttcctgccaagtgtaatcttaggaccacatctgaaatctgtgttatgtatgggtttagttattttatttgttatttcccaataatgatagcctttgcaaaaaccatccatcagaaagaggacataccttaaccatggagcccttggtactttcctcttcataccacagtatggcttgtgattccaaggaaaaagttgtgtaataaccttacaagcagcttcagttccttcctggtaaacctgtggtccgtggaacatgtgttttgatccagcagttcctctgccacctggaatcttgagataagtgtgtgggtcagtgtgcatgtgtgcccatacatgcttatgaggaggtcagtgtgtgaggggaatcaggaagtctcttttttatttttaaatgaaatcaagtaaaacttaaccttggcttcaaaaatatctctcaaatactgtaaacaatacctttgatactttttagaaagagattatggcca

SEQ ID NO: 2032 - protein, 6 aa, Homo sapien
MTSDYT

SEQ ID NO: 2033 - DNA, 1582 bp, Homo sapien
  Unsure 146-168: Unknown base
gtgtttgtagttctgtccagctcacattttatcttcatactttgagtagcctccttccatgaatggatcatccagtggccgcacttaggttctcctatgaagatttttgttgtattgtacctcagaaccatctccatattctctannnnnnnnnnnnnnnnnnnnnnnattgaatagaagtatttactagatgaggaggaaaaccctaaaacaaaacatgaacataaaatatttttaaaaggaagacatacaaacagacactataaccaaataagatgacagaattaaggccttatgccacagccagagttgaaaaatgcagaaaaaaagtttaaaaacaaggaattaaagccaaacctaacttttatcaaaataaatgtaaaagtgatgaaagaatctgttaagatatcagattgtaatataaaagatactagaaacaaatgccaatagaacacttaagtacattttatatattcatccattagaatatatagctgtcagaatgatagaagaattacatatgtgtgcaaaagtttttgtatccatgtggaaaacacaggaagctaatagtactgtttttctctggagtgggtgtaagggtagagacttaactctttacatccttatggcagccttcgaataccttttaactcccagttcccttaactgggggtgtgtatcctagaatcctcgacccattagaaagtatattgtagacatcatactctttaccctttaacactacacatgcacttcataagaacaagcatgctgtcttacccaagtacagctatcaagttcagaaatttaacattgccataatactttacagtccatatttcaatttcatttgctgttttattggtaatttttttcagctccacgatccagcctaggatcatatgttgtattgccataaccctctaatctggagcagttcctcagcttttctttgttttttataatagtaatatatttgaaaaatacaggacagctaaaggatagagtatccttctatttgggtttttctgatgtttcctcatggttagattggggtagtgcagtgagggttgaaatgctgtaagtgatatgtattgcaggtatacatccagatgcacagaatgtccatttgtcccttattggtgatgctaattttgatcacttgggtaagatgtccagtttctccagtgtatcgttattgtttttccttttgcaattagtgggtaatttgtgaggagaaactttgagaccttgttgacaattctgttcctcatcaaatctacccctcctaggtttagcatcctttgacgattcttgtctgaataaatttttactaggatgtttccaaaattgtgattgttctaactccattattatttctgtattaattagtcatcattctactgtaaggaagaggtttccctttatcatcaacttcgagtaagtacttttttctgagccatttgaatattccttactagatgtggtgcctctttaccccaattacttaagtttgtatttccaaagaacaagggtgttttcctgcatagccatagcacaattaccaaaatcagaaaattaa

SEQ ID NO: 2034 - protein, 60 aa, Homo sapien [sequence omitted]

SEQ ID NO: 2035 - DNA, 2613 bp, Homo sapien
atctttccatatttactgagtttaaatgaatcatctcagagagaaaagaaaaactaaatatagaaaagtgcatggcagaagctgaaatgagctcaagcagtactaaccttggaaccattctgggtacccaaaagaaaaatttaaaatcaagatgagtaaaaggagaatggtctcaatatcctcaaaaatgcagtaagagaagtaattccccactgaaaatgtctctctttctttctatgttataccctggagtcctggttgaggggtgggggaatcagaaaagtaggtttacatttaacatttttcttaactacattcacttcttaaaaaggaacaagaagtgtaaataagtatgtatagagtgagggattaagcatatttgcattggggactcgtgtattatgcttttaagtcaaaattaatattctcaaattcgaatttgatagctattatttctaaatctttttaatcctcaattttcctggtaaccttctttcaagagtctccttcttctaaaagttgccaaaccctttatatttaagctttttccactcaggactcaattagagtggtcaacagggagagggatggtcccatttgatctttgccactgagcaaaacaaaacttcaaatgaacttttaaactgtagctttagtcttctggtataaagtggggaagattacacttatgtgatcaccaaaggatttactagtatcttggtcattccaattgcacaatgttaactgtacaacacacagcagaaaagtgaatagacttcactaagggattctaagtttagaaaataggttttgttttcttaaaaaattttgtgtataatacaaactaatgaaaactatacatattctccaattcctatagtaataataatgtaactgttacaccaactttcctcatatttgagagatgagtacatgttggattgcagcatttcttcatgttaaaaacatggaatattattcaaatatagtacttggggcctaaacaactaaaattagtcaccgcataactagttgaaaatggcataggcataaaatgttaataaagaatggcagttatatttatgctcacttcctggagtaattgggtaatattcagaaaggcacatcgtggtagtttaagtgtacaaggccttagggcagtatctagcccagtattattccagattctcctgagctctatataaagggcattttggaggaactcttctgggcaatatctttcccaatctcatctaaattctgggaaatattttccatagcagacaacccagctctgaaactaagcacctggtgatctttagtttgagatgtctatatggtacttttgagttatatcaattaagatacaagctatagacatgataaaaatatgaaatcaagatatagctcagtgggattggattaagacataataatagttctaagaattcacttttgattgtatgttttaccaattcaataattccactaatcaagtattcacattttgacttttgattaaataaaaatttgaattaaaattattcccctcttctagtgttgtctttaaccgttgactaccgcagcacttctccctcctttacaccccctgcaccccaccccccaagcccccagaaaaatggaaataacttccaaagaactctttccaccaaatcacatcacaggaataactatcagatgaatataaattaacctttagctacataatgcttcactttttctaacaccattaatacggctattttgacatgagtagtcttctatttgtggcatcagataaatgacacaaagttctcttgtgatgattaggcagtaaaaacaggtatctgtatgaagggaaatctctagcatataactatttcacatcaagaccaattagcaattacttgaatgcctaatataaacaaagcaatgggaaagaaccttctacttaggggaaaagaagatggaaagtacaaagaaaaggtacctatgtttcaaaagttttggcaatccctatattctctacccacaagatacctgatacagtatcaagtattacagagttgaagagtcacggcctgaggtaactaatactagaaaaagttaaggcaaatgggcacacaattcagaaaaacacttcttgcgattttcaactaactaacatcattacttccatttaacacctcatgtaattaacttagtatctcaaggtagagactggtctaataatgcccaaagagcatgttatcttacaataaacataaacaattaaagtagatcagcctagtttccaaaaacatcaataattttcaaagtttacaagaatcacttgtaaatttccacatggctactcttctagaactgctattctaataatgtctgggaacataagcaactgcctatagtaagaagtaatgattctcatatgcccacataaaggtatggaaaaatgctcactgcctagatcgcttaattttttttttttttgggtaataaactaaaaactagtaatggcgggtttcagatgtaacgggttggaaagacagtagtaccgtgcaaaagggagatactacgggggcaaaggatgctggagtaaaatagccagaaaca

SEQ ID NO: 2036 - protein, 18 aa, Homo sapien
IFPYLLSLNESSQREKKN

SEQ ID NO: 2037 - DNA, 686 bp, Homo sapien
caatataccccacccccccatcatgcgtgcatgaacgtacactaaagtagatgaaactataccagagtattaatttactctgggtgatggttttattggtaaggattttgtttgcaggtttattgtttctgtaacaagcacacattacttacataactaggaataaaacatttattttaaagggttaatgctactataattgcagttttttccccaacaagttaatagttaagaaccctgatctcaactcttcgtttttccaggttatttatttcataagatgactatccataaatcttccgatgaacgaacctctttatgaccagagctcctggggttaaaggagaaaggttttataatggctgtcttaatttgtttggtggttttccaggtattaatgccaaatttgcctttgtttagtttctgtttcttatcacactgttttcaggttacatcattatcttaaaaaggcagaggctttattttcttcgttgtgatataacctaattcttagaggtttcttaccaagatcactttgcttgttttgcttaattttattttctaaattttacaaattaatattttccaccaaaaggtggaacgaaacaaagacagcaaaatatcaaactgtttagtaatagttaaaaaagtcaagtgggaaggaaggtttgaggctgaggcaggag

SEQ ID NO: 2038 - protein, 33 aa, Homo sapien
MTRAPGVKGERFYNGCLNLFGGFPGINAKFAFV

SEQ ID NO: 2039 - DNA, 2329 bp, Homo sapien
aaaagtaaattaaaatatttctatataaaaataatttaaaaagaaagtgatgtggtggaaagggataggattccttataagctaattatatataaaatactctcctgctcttttttatttataattcaatcattccctaattaatttattcatctaatcatgaaacttgtttagtcacctacttgggggcaggtactgaggacgtgatgacaaataaggaaatctttaccctttagaactcatcatgtactgatccatactggtcactttgagattctggtacttctaaaaataacttattatttttacttcttattataaaaatcatacatgggacatttagaagatataggagagcaaaggtaagagaattcactgtgaattaattattcattgaacacctattttgtgccattgactatccttattgctgggagcacagcgtttaaaaaaaaaccaaaaacctttctcccactctaatggatgagtcacataatgggaaaacaaacaaatgtatcatctattagagtgggagaacttggttttgtagttttaaaagtattgtcgtggaaccaacgatactgcttgcatctgtacaccatgattagagaggaagtggatggagagtgtgtgtgtctgagagagagaatatttagaatgccaaaagcgggcacttcaaggaaggcttttatttaaaaaaaattagctcattctacatactttagaaattacctttgagtagcaaatgttaaggatataaatactttgcacgtatattccttgtttatagttaaccatatgttattttttacctgcaaaatactaaaacatattctacctacgtgcaatctaagttttgtagcagagtctttttacgggggccaaacaattctggactaatttttaaaaccctgaaatggctcactgttttgaggttattttgatggagtatgaatttacttctttgtcatttggagaaggtgcacagtattattatgaacagagaagagctgtatgaaaactgatcttccagcatctatcatctccttttagtctaatgagatactgccattatctcctgatgaaatattgttctagaaaaccttaccccatcatacgatttctgcagatcttacaggagcaatctgagctcaagcaatattaattactgtttcatttgtccatttgtctgtgtataatcatgtattttaatgatcttctattttctatggtttgtgtagatttggagactaattcaaaagagttgaagttttttggacatgtttagttgaatgtgcagttctcttttgaagaatcctgtctccaaatcctgttttgaaaagagtgttgatgagtagcacagcacctgtcatattgtgagtgtgcaataaaatcatgccttttcagcagaccttaactaaagagttaattttatttatttaaatccacctttcagatgactctcattctgctttgtcagtggttgacgagggtaaaggcacttgaggatgcacaacacacaggacagggagcaagcctttctcagtgcggagagctaggataaacttttgcttagaaaggggtacattaatgacaaaggatcacagcattatgggaggatactacacacctgttcttcagggagtactctggacatccctgttccttccccacatggcaggtgtcttttcaggtgctcccaacacactaccctgaattcccatatccgggttgccctctatgccagcctctcctcttagccttgaatttagctttgttgcttaaggcaagtcacttccctctccgggtatgtttcttcttctgaaaatggatgcagttgaactagatgagagccaggtggcttcaattgatgtgcggtggccctctgccctgcttactttcatctccaccactccaaggtggctcacaaacacgaatcctcagccccttggattgggttcaggggagtgctatcaggaacccatgggagagacaggaatgttttcagaaacctcagcctgtcctctttttactgaaataggggcccttgttgatggtagtcactgcccatgctgtttagcctaaggaaggtgacagtgggtgggccacctcaggccatatggaggaaggcctggcacagaaacacaaggccaggcaggctgtggctagcctgaatttagctgtagcctcagaatcaggggacttgggcttgacagctgacattacatggtgcacaactctggttaagtcacttaacttaaatcttatcccctcatctgtagatggcttgaaaaccaaattaaggagctccttctccgcatacattaaa

SEQ ID NO: 2040 - protein, 69 aa, Homo sapien [sequence omitted]

SEQ ID NO: 2041 - DNA, 962 bp, Homo sapien
ggcacgagggagcggcccagagcgcgcagctagggcactggcgaaaccccgggacagtccctctccgtgcgggggcggcgcagagcagtcccatccccggggtcccgggcgcggctgactgccggctggttccctgcgcgcagtagctccccgagccgggctgcaccggaggcggcgagatggtcgcgcgcgtcggcctcctgctgcgcgccctgcagctgctactgtggggccacctggacgcccagcccgcggagcgcggaggccaggagctgcgcaaggaggcggaggcattcctagagaagtacggatacctcaatgaacaggtccccaaagctcccacctccactcgattcagcgatgccatcagagcgtttcagtgggtgtcccagctacctgtcagcggcgtgttggaccgcgccaccctgcgccagatgactcgtccccgctgcggggttacagataccaacagttatgcggcctgggctgagaggatcagtgacttgtttgctagacaccggaccaaaatgaggcgtaagaaacgctttgcaaagcaaggtgagcactgttaaaatccggctaggccaagatttcccaatgtcttgaagccaatggctaggaaaacagctgagcctgggactggactttgtcagtaacctctcttccctagggcacgggaggagtgggtgaataggacctcttggcttgaggaccatgattgtgaatacagacatttaattcagaatgacacctacattgatgaattttcattgtacaagtgtttttccagatcaaacacaaaacccatgtaattccttgataaattttcaatgcagggcagataaactgttgctaacatttttcatttatatttactgaagttattttcatcagaattcattctttttcataagttattaaacaaatgtgtgatctattgaaaaaaaaaaaaaaaaaaaaaa

SEQ ID NO: 2042 - protein, 130 aa, Homo sapien
MVARVGLLLRALQLLLWGHLDAQPAERGGQELRKEAEAFLEKYGYLNEQVPKAPTSTRFSDAIRAFQWVSQLPVSGVLDRATLRQMTRPRCGVTDTNSYAAWAERISDLFARHRTKMRRKKRFAKQGEHC

SEQ ID NO: 2043 - DNA, 1016 bp, Homo sapien
tcgaggatccccttattcgtgttgcactgattataatgtgaaaagagaggaggaaaagggagggaaggctagcacaatacctactagcaggaggctagtattagtacctacagcacattttcaatctcttgtatctgtgttctttaaatcctcaaaacagtatcaattcttatagttgggttttttcttagaacttcaacaattatagtatcataccattcagcacatgaagataagaaatcactacgtctgaaggttaaaagtaaactttagtctaacattgtctcttatttagttcatctccaacaaactatgtgccaagcattgtgctacatggtagaatataacagtaaatacgacagaacaccatgacaggaaagtttaggttctagtggagaagacagacaaattaagcaactgtaatctggtatagtaagtaggaggatacacagggatacaaaaaaatacctgtctcagtcttagaattttagcatacatttcctgaaagaactgatggctaaactgagacctaaaagatgaatggcaactgacttggaaaaagtgagggactgagaaggaaagtgagaaaaatataacaggcagtgggaaaaagcacaggcaaaaaaaaaaagaattgacttatcaaaagatatatagccataacaataccctaaacattctttacaatatactttacaaatctaattcccaccaaataaaatggaaagaatataagcttatatgcagacatgttaccttactgtgctgaatacagacatactaccttacttatggaatttctttcagttcctcaaactgaaatatgcctcaaagaacattttaaaagttcaaaatattctcagatctgtcctttcatctggtatcagcaataaccctatgagcacagggcaggggaacaggcattatccactctctccctcaaaagttctccacaatatgcccatttttctactatacataggcttatatcccaaacaagttacaattattcattc

SEQ ID NO: 2044 - protein, 90 aa, Homo sapien [sequence omitted]

SEQ ID NO: 2045 - DNA, 771 bp, Homo sapien
ctccactgcaaccacccagagccatggctccccgaggctgcatcgtagctgtctttgccattttctgcatctccaggctcctctgctcacacggagccccagtggcccccatgactccttacctgatgctgtgccagccacacaagagatgtggggacaagttctacgaccccctgcagcactgttgctatgatgatgccgtcgtgcccttggccaggacccagacgtgtggaaactgcaccttcagagtctgctttgagcagtgctgcccctggaccttcatggtgaagctgataaaccagaactgcgactcagcccggacctcggatgacaggctttgtcgcagtgtcagctaatggaacatcaggggaacgatgactcctggattctccttcctgggtgggcctggagaaagaggctggtgttacctgagatctgggatgctgagtggctgtttgggggccagagaaacacacactcaactgcccacttcattctgtgacctgtctgaggcccaccctgcagctgccctgaggaggcccacaggtccccttctagaattctggacagcatgagatgcgtgtgctgatgggggcccagggactctgaaccctcctgatgacccctatggccaacatcaacccggcaccaccccaaggctggctggggaacccttcacccttctgtgagattttccatcatctcaagttctcttctatccaggagcaaagcacaggatcataataaatttatgtactttataaatgaaaa

SEQ ID NO: 2046 - protein, 110 aa, Homo sapien
MAPRGCIVAVFAIFCISRLLCSHGAPVAPMTPYLMLCQPHKRCGDKFYDPLQHCCYDDAVVPLARTQTCGNCTFRVCFEQCCPWTFMVKLINQNCDSARTSDDRLCRSVS

SEQ ID NO: 2047 - DNA, 340 bp, Homo sapien
  unsure 134-257: unknown base
aattaaaaacaaaaatactttagggtgatttgcaatataattttccaaatgtctcagggattataaatacagacttgcactattatgatgcctctagttatgtatggctattgaagtaaaattaaagactcagnnnnnnnnnnnnnnnnnnnnnnnnnnnnnnnnnnnnnnnnnnnnnnnnnnnnnnnnnnnnnnnnnnnnnnnnnnnnnnnnnnnnnnnnnnnnnnnnnnnnnnnnnnnnnnnnnnnnnnnnnnnncactatttaaagatctgagctgaaattgtactgactccagaatctacaatagggcattttgatggtatttaaatagaaatcta

SEQ ID NO: 2048 - protein, 58 aa, Homo sapien
  unsure 11-52: unknown amino acid
MAIEVKLKTQXXXXXXXXXXXXXXXXXXXXXXXXXXXXXXXXXXXXXXXXXXLFKDLS

SEQ ID NO: 2049 - DNA, 882 bp, Homo sapien
tcgataaattttgttgaatgaaagaaaaaaggcaaattaaggtatttattcagtaaacaaaaagggatagtgaagaaccaagctccaggacttttgaagatagactttcttgtctgtggtgcactgagaatcagctctatcttagtattcatttacgtgtggagatctagaacagagttacattctttctggtgacaagctgagactacctggctgctcaatatccagctcctgggagacaagggcctcaaaactgttgggattggggggtggggcaggtagggaatcttactaccatttgttaggatttttaccatcaaacctaggagtagcttggaactgggtaagatcttagaatttagagaagccatagcctgaacaccacacacttctcactgaggaagataggggtgataagatcatggaggaactggagaggaatatgaagacagtgcctacaaccaccacatacacagtaaacattctctcttctcagtggttgaagttgttcttgattacagctctcttatctgttctccctttgatttgctgactgatggatgcagtccatttaagaaatgagcatagcatattggaaagagcactagacttagattctagtcccagttctgtcacttaacagctatgtgttgaggtgaggtgagggaagagtacttggatctctggatctcttttaactttaatattctcctctataagggtagaagatgaactagaggatcacaacagtaccatttagttttccgttcagtggcaattttgacatacttttttgagcatacataatctcagaatcctatgcctcaaaactttgattcattggacagatttcaagaaaaatataatttaacaaatgtaata

SEQ ID NO: 2050 - protein, 36 aa, Homo sapien
MKTVPTTTTYTVNILSSQWLKLFLITALLSVLPLIC

SEQ ID NO: 2051 - DNA, 1628 bp, Homo sapien
ggcacgaggattgctcaggacagcggtaaatcacttcttggaggtgccctgcacgccggtcctgggagcaggcggcctcccgggggtgcgggagccccactcctccgtggtgtgttccatttgcttcccacatctggaggagctgacgtgccagcctcccccagcaccacccagggacgggaggcatgagccggtcaaggcacctgggcaaaatccggaagcgtctggaagatgtcaagagccagtgggtccggccagccagggctgactttagtgacaacgagagtgcccggctggccacggacgccctcttggatgggggttctgaagcctactggcgggtgctcagccaggaaggcgaggtggacttcttgtcctcggtggaggcccagtacatccaggcccaggccagggagcccccgtgtcccccagacaccctgggaggggcggaagcaggccctaagggactggactccagctccctacagtccggcacctacttccctgtggcctcagagggcagcgagccggccctactgcacagctgggcctcagctgagaagccctacctgaaggaaaaatccagcgccactgtgtacttccagaccgtcaagcacaacaacatcagagacctcgtccgccgctgcatcacccggactagccagaacatttccatccggagtgtggaaggagagatatactgtgccaagtcaggcaggaaattcactggccaaatccgggagaagttcatcatctcggactggagatttgtcctgtctggatcttacagcttcacctggctctgcggacacgtgcaccggaacatcctctccaagttcacaggccaggcggtggagctgtttgacgaggagttccgccacctctacgcctcctccaagcctgtgatgggcctgaagtccccgcggctggtcgcccccgtcccgcccggagcagccccggccaatggccgccttagcagcagcagtggctccgccagtgaccgcacgtcctccaaccccttcagcggccgctcggcaggcagccaccccggtacccgaactgacggctgagatgaggttagaatgactgggcccggctgaacattccaaattggatttcaccatctgctgagaaagtttaaggaaggcaaagcttgccaggtcacagaagctcccaagcccagctttccaaaggcctcagcctgtgcctgtgtcgagctcagtcctgggagataggggagaacctgcaggcaggaacaagcccccctactcctgaccaccctccatcagcagtctcccctccgtggtcgtctttgttgacaaaggtgcagtttctcctctcctgggcacctgtaacatgtgatgcgctgcctgctgggaggttaggtcggggctgccccggcgagtggagcatgagcagaaccgccgagggtcacttctgggcagaagctttgagagcctgggtccaggttgccacatagaagcagctctccagttgaaaccctcctctgccagcctggggtcctaagcgatgagcagaatcccccactcccaccccaccaacccacaatggatatgtagtgagcaagaaataaacctttgttgtttaaaaaaaaaaaaaaaaaaaaa

SEQ ID NO: 2052 - protein, 294 aa, Homo sapien
MSRSRHLGKIRKRLEDVKSQWVRPARADFSDNESARLATDALLDGGSEAYWRVLSQEGEVDFLSSVEAQYIQAQAREPPCPPDTLGGAEAGPKGLDSSSLQSGTYFPVASEGSEPALLHSWASAEKPYLKEKSSATVYFQTVKHNNIRDLVRRCITRTSQNISIRSVEGEIYCAKSGRKFTGQIREKFIISDWRFVLSGSYSFTWLCGHVHRNILSKFTGQAVELFDEEFRHLYASSKPVMGLKSPRLVAPVPPGAAPANGRLSSSSGSASDRTSSNPFSGRSAGSHPGTRTDG

SEQ ID NO: 2053 - DNA, 543 bp, Homo sapien
caagaagaaaggaatccgattggttctgtgtctgtctcttttggtattctcagaattatgtagtcattcatatagaaagatgattaggaaaataggacaagaatagcagaaatctacataaaaatgtaggaaattaaaattagttaccagcatactataacttctgtatgttataattacatactataactcacccctccttggcaaatattctctctcttttgacttcaaaatcatggcttatatgtactttctctatttcccagatgcaaatataattaattgactttatttatctaggaaatgttactcatatcttaattgtagtcattggcttgagtgacgggttttggtaattcaactactattacttgaaagtagtagatttcataggatactgttataaaatctttttaacctcttttctgatttcaggagtaattagtaattgtggtttactggaaaattcaatgaatagggtgttaaaggaagcaattcattaataatatatctaatctattgggagactgaggcgggtggatc

SEQ ID NO: 2054 - protein, 34 aa, Homo sapien
KKKGIRLVLCLSLLVFSELCSHSYRKMIRKIGQE

SEQ ID NO: 2055 - DNA, 2101 bp, Homo sapien
agtctgggcgtttaggtcagaactaccccggtagcctgacagcaggagctcgagagaagcatggctcagcggtgcgtttgcgtgctggccctggtggctatgctgctcctagttttccctaccgtctccagatcgatgggcccgaggagcggggagcatcaaagggcgtcgcgaatcccttctcagttcagcaaagaggaacgcgtcgcgatgaaagaggcgctgaaaggtgccatccagattccaacagtgacttttagctctgagaagtccaatactacagccctggctgagttcggaaaatacattcataaagtctttcctacagtggtcagcaccagctttatccagcatgaagtcgtggaagagtatagccacctgttcactatccaaggctcggaccccagcttgcagccctacctgctgatggctcactttgatgtggtgcctgcccctgaagaaggctgggaggtgcccccattctctgggttggagcgtgatggcgtcatctatggttggggcacactggacgacaagaactctgtgatggcattactgcaggccttggagctcctgctgatcaggaagtacatcccccgaagatctttcttcatttctctgggccatgatgaggagtcatcagggacaggggctcagaggatctcagccctgctacagtcaaggggcgtccagctagccttcattgtggacgaggggggcttcatcttggatgatttcattcctaacttcaagaagcccatcgccttgattgcagtctcagagaagggttccatgaacctcatgctgcaagtaaacatgacttcaggccactcttcagctcctccaaaggagacaagcattggcatccttgcagctgctgtcagccgattggagcagacaccaatgcctatcatatttggaagcgggacagtggtgactgtattgcagcaactggcaaatgaggtttatggagagaaatcccttaaccaatgcaataatcaggaccaccacggcactcaccatattcaaagcaggggtcaagttcaatgtcatccccccagtggcccaggccacagtcaacttccggattcaccctggacagacagtccaagaggtcctagaactcacgaagaacattgtggctgataacagagtccagttccatgtgttgagtgcctttgaccccctccccgtcagcccttctgatgacaaggccttgggctaccagctgctccgccagaccgtacagtccgtcttcccggaagtcaatattactgccccagttacttctattggcaacacagacagccgattctttacaaacctcaccactggcatctacaggttctaccccatctacatacagcctgaagacttcaaacgcatccatggagtcaacgagaaaatctcagtccaagcctatgagacccaagtgaaattcatctttgagttgattcagaatgctgacacagaccaggagccagtttctcacctgcacaaactgtgaggtcaaggggcctgctgggttaggcatgcccgaccccgggacaggactaacccaagggggaaagctagtgttgatgaaacttttgatcaaaaccacattgtaaaacattgcccatctgtcttgctcactcttaaactctcccaagaacaaggccggggtaaggtaaagtcagcagaaatctggcttctcccttcctcccgacatctgcatcccttgatccactggcatttgctgccctcttgtcccttatctgtcttatgctggttatttcactgcttcaccttccaggcttgacttaacaaatgtagatttgagaaatctcaaccagttgttacctgataggagtctttaatttagggcactcttgctgggatgctttctccagagcttatatatttcttcttactagaactttcttcccccttttattcccctctcttcttggactcatgagctgtctcttcatctctcctctctctcctgcatctctccccttactcttcaatttattctacttctggacctggacttacccaaactgtgatactaccataattgtcaccataatcagtcaaataaagtgatctgtgcatc

SEQ ID NO: 2056 - protein, 361 aa, Homo sapien
MAQRCVCVLALVAMLLLVFPTVSRSMGPRSGEHQRASRIPSQFSKEERVAMKEALKGAIQIPTVTFSSEKSNTTALAEFGKYIHKVFPTVVSTSFIQHEVVEEYSHLFTIQGSDPSLQPYLLMAHFDVVPAPEEGWEVPPFSGLERDGVIYGWGTLDDKNSVMALLQALELLLIRKYIPRRSFFISLGHDEESSGTGAQRISALLQSRGVQLAFIVDEGGFILDDFIPNFKKPIALIAVSEKGSMNLMLQVNMTSGHSSAPPKETSIGILAAAVSRLEQTPMPIIFGSGTVVTVLQQLANEVYGEKSLNQCNNQDHHGTHHIQSRGQVQCHPPSGPGHSQLPDSPWTDSPRGPRTHEEHCG

SEQ ID NO: 2057 - DNA, 1733 bp, Homo sapien
ctccaggtctacccttcactgctctgtgtcctcagcgtgtgtggcttcgtgacctgaagatactgggaaatccatagctaagatgccaggaccccctgaaagcctagacatggggccgttgacatttagggatgtggccatagaattctctctggaggagtggcaatgcctggacactgctcagcaggatttgtataggaaagtgatgttagagaactacagaaacctggtcttcttggcaggtattgctgtctctaagccagatctggtcacctgtctggagcaaggaaaagatccctggaatatgaagggacacagtacggtagtcaaacccccagtagagacggggtttcaccgttttggccaggatggtctctatctcctgacctcgtgatccgcccgcctcagtctcccaaagtgctggtattacaggcgtgagccaccatgcccagcctaataaaaatttttttatttctattgtatccaatagcttgttttaagtgtgtagaacaataacttacacttttatgttaattttatattttgttaatttactgactgtattattagtttagacaaatttcaatgtactgtggttttttatgtgtaagattatatattcctcaaacagcaactttttacttatttgtcttcagtttcaatggctttaaaaagaattcttttttcattattctgccacatgcttccagtgctatgttaaaatagaaacattgacaaagggcacaatagagtttactattggtgtctgtgaatttgaaatggcaaacaactccttaagtttttataagctgatttcaggaggtaaagatcttcttttcttgtgttccccagggttttgggatgccctctgggtttgtagtggagtggggttgtaacttggttgcaaggctgctggttctacattagggtccatatttagttgtcatgttacaagaggcttgggtagttgtacttcccaatttttttttttttttttttttttttttgagacaggagtctcgctctgtcgcctggctggagtgcagtggtgtgatctcagctcatcaaaacctttgcctccctagttcaagcgattttcctacctcagcctcctgagtagctgggattacaggtgcccaccagcacgcccagctaattttttgtgtgtttttagtggagacggggtttcaccatgttggctaagctgggtctcgaactcctgacctcaggtgatccacccgccttggcctcctgggtgctgggattacagacgtgagccaccacccccggccacttgtttcttttaaatgcttattaaaagtttctcatcagaatattttatttataattatactgcatattctctgaaattttactgccaatttttcaaaatacctgcttttgatgagtacagttacagtcaaatactgtagttagacaaattcttttttaatggtatattaatgttgcataccaaattgtatgagttaaacgtctcttcctgtgcagtttcatattagtggtgttttcagtgtaggtatcttaatatcagcttatcgtggtttttggttatgtattataattttagtcaatttgcaattctgtctgtatactttatgtcaatgtgaggttgaattaaaagatagccatatgtctatcacaaaaaaaaaaaaaaaaaaaaaaaaaaaaaaaaaaaaaaaaaaaaaaaaaaaaaaaaaaaaaaaaacctcggg

SEQ ID NO: 2058 - protein, 103 aa, Homo sapien
MPGPPESLDMGPLTFRDVAIEFSLEEWQCLDTAQQDLYRKVMLENYRNLVFLAGIAVSKPDLVTCLEQGKDPWNMKGHSTVVKPPVETGFHRFGQDGLYLLTS

SEQ ID NO: 2059 - DNA, 379 bp, Homo sapien
tcagtctcaaaagaaaaaaaaaagtgggattattaggtcaaacggtacgtgtgttttaaatttagatatactcaagatgccctttagataggatgtctatttcaaattcccatcaacagtgtattagtattcaattccatatattcttgctagtgatttgtcatctttagcttgttgggagtttaaagtagtttgaaacagttttctgtttctttttcagcatcaggacttacttccatagcttaactcttcggagggagctgataaaaatgaaagatcagtgacaagggagtggtgtagaccagtggtcttcaaactttttggttgcttaccccatcactaaaaaattttgagcattaagcaggtgcggtacatggtt

SEQ ID NO: 2060 - protein, 29 aa, Homo sapien
QSQKKKKSGIIRSNGTCVLNLDILKMPFR

SEQ ID NO: 2061 - DNA, 1887 bp, Homo sapien
aacaatggatattctgtaaaatatcctgtacaaaacaagactattgccagtaatgtatacaaattgtctttttgtgtacttccagcataggtttggatatatgaacatttttcttttattgttttatcttcacagaaaataaaaggtgttaatttgctttttaaaacaaatttaattatcacattttaaattactttgtggactgtgttttcaaaactttgcaaattcatctgttacacagaaaattttgacttaaaacatctgctgaattccaaatttctgtaatagctactgtatctgtgataaactttcctatatctttccttgccatttctatggattttataatgaaagaaaaaggcattggagactgaaggcagaaatggttgtgacagtgctgtttggctttttcattcttcaaatgccaagtcatccactttgttttcctgtttaggctttgcacaaatacaattgctttcaggaatcctaaagcagcattttattgagtttgaattattaaaggtacagaggaaatgtggtgatgtagaacttttcctaacacaggtatctaggaagtaagtgctgagttgattttctaggttcttacgtatttgaaaaataaaattgcaattcgagataagtgcttgagcactctacttaagtattctctgtgttttatgaagagaaaatgatctgattttcccttatacttcattttacaatacatattcccttttaacttaaaaaaattgtaaatgtgggagaaaaaaccctgcaggatggaaacaattattaagaatgtagatcaataagtactttttagtgatgtggcagaaatccctgttgattctaagttttagagtgtcttttcccctatttctgacctacaactataaactactctctattaggagaactagaccactttcttcattcttttctaaactgctgcagattgccgtgaactctatcaatagtctcttttccgcaggcaaagtggcattttctaaacatgtttgcttactgccaggtggtttgaaatctatgatttactgcagtagtatgtgcttaaaacaactgttgaggtcttttaagcaggaaagttcaaaaggaagtgtcctgataatggtactggtttttctacaaatataagtagtcattagaagtttgcaaccaccaccaagtctgagagaactctgggatattctgtgggtttggcatattagatagagaaaatgacagatctagatgaagggagcttttggatgtgtgcctttaaaaactgattatgtataaatactgatatttcacatacggagatatttgaagacccaagtctgcctttcacagagccctccattccaagtttagtttttgtcaaaatatgaatcattttatttgactgtactatcagtacacaaatgcatgagtatgtttatacagtgttagactgatgtgaatttgcatttgttacattacattgccagcgcatatcatttagcaagttggcattaacatttatgctttaattaaatgccagtatacctatgtgtgcagcagtaaaaaattagtgagaaaaagcaactttttgtcactcttaggaaatattttgtcttattagtgttcttggcacatgtatattactaaagtagataattccaatgagaaatactaccagattattgttataaaattaatttacaatgtccctgatattgagctaactcttaaaaaaaccaaacaaaactcgtatctgagtgtaactttgccaatattttaaaagccaaaatattctctggacaacaaatttgtattgctcagggacagtttaccttgcctggtaaaccttcccaaacagaaatatagctatactatctttggttttgt

SEQ ID NO: 2062 - protein, 108 aa, Homo sapien
MWQKSLLILSFRVSFPLFLTYNYKLLSIRRTRPLSSFFSKLLQIAVNSINSLFSAGKVAFSKHVCLLPGGLKSMIYCSSMCLKQLLRSFKQESSKGSVLIMVLVFLQI

SEQ ID NO: 2063 - DNA, 745 bp, Homo sapien
caacacatctgatcctagagttccttctcaagtgtctgccagcccatgaagagttctaattaggaggcaggagttcgctcctttctgaagctgtgccgtttctctttgaagaaatgctgtgtctaggttacttttctttatgtaggactggattaactctccatagtttacttttctttctcccctacccatcagtcttcattttgtccatttgggcctatccccacataacatctcctcagatatttgaagacgtgtctttcaggagtcctctcaatcagtgtccccagtttcatcagctgtgggtcacatgtcctcattcttagtacccctaccatctcagttattctccaccaaaaacatttaacctagcctttcactaggtttcgagtaatacaaaatagagtagtataatatgatctatgctaaattcatcatttttaaagtagcctaagactattagctgttttgttggcagcctatacactgttaagttatgaagtgcactgttaagtacttagtatgaacgttgatgtcaaggtcttgggctacttttaattcatgccttgccctcgctctacttttacagtaactagctccaagtataggacaagtccaagtccgtctgtgcttgctccagtccagctactttttctaccctaccagtgtctttgtggacttgagttgattcattcactattcatatgcaactctgataaactaaccgtgtaaaaataaaacattg

SEQ ID NO: 2064 - protein, 18 aa, Homo sapien
THLILEFLLKCLPAHEEF

SEQ ID NO: 2065 - DNA, 1084 bp, Homo sapien
gtgcagcaccatccttagagagatctctttaggaagagatgcaacccatccccagatccaagacttaagcagcacgacctcacccgctgcctttttgccaacacccagatctggagccccacaggggctgaagcatccacatggcccagggtgggatttctgtcccttgcacctgcatgtgacctcacaattcagaaaggactattagaaaaacatgtttgtgctctcgagtgtgggtctgagcagccacagtggctccacgggaggcctacaggaagcaggtcagagtccctgggccttctctctggctctcattcctgccctgtagaacaggcagaacagctagcagccctctggccacggggaggttagcagagttagacatggaagctcctagcacagtgcctggcagaggaagcgctgataacagcttgtcttcctcgtggtggggcaggtgggggtgggaggaggcaagcctgcagctccctccacagccccaccagctcttccaggaatctcaagttcaggcatatctctgaccccaaccttaggaacgcaatcagaattaaagtatcttcttgaaaaacaagaacaagaaacccttcaccactcctacccacagcctacacttcagactctttcacctccctccttgcagtgtggggatggggttccatatcccacaacctttagttcgatttgcaaaatttcttccaacacaatcttcctgctcgcagtggagcactggatgggccacgcttaaatattagtatgaactgaccaaactcttcacaaatgcccttctagtgtctaggatggtgtctgccagccacacaccctctaagccagggccactgctgactcaaagtgacctaaacttaatcttaaatggccaaaagagtgtctgaactaaaacttattcccacttcccaacaaatctctgattaagtcaatccattctaagacgtccttgagagaaataccgacttactatactctactctaaataccagttagtctatagtttggtgtcatccatgctattaaagacagcaagaagttcaagttgaataatgaattaaaa

SEQ ID NO: 2066 - protein, 68 aa, Homo sapien
CSTILREISLGRDATHPQIQDLSSTTSPAAFLPTPRSGAPQGLKHPHGPGWDFCPLHLHVTSQFRKDY

SEQ ID NO: 2067 - DNA, 2082 bp, Homo sapien
  Unsure 1495-1516: Unknown base
aatgaattgcagatttcattttggtgggcgatacattatcatttcgctaataaccaaatttgcagtttgttcagggtcttgaatagatttacaaatatttaacactgaagctgttttgaactttcagtaatgtaaactctctactaattgggtagttagaagctgggcagtgcattttaacttttactagactcataagagagactggtcatttttacctagcagttttaaaatatgggtcaaagtatccttgttggatttatggagtatgcaactgtagtggtaaaatgttataaagcatatgccttcatataaagaatagggatttgctttatgtattcaaaattctctgagtgccccctttctctgttaaaattcaggttctgatcatttttctaagccagttttcctaagtccaaaaggaatacttttagctgaatttaaaaaataagtgcaccttgtcaaatgcttgtgtttttacacttgtgtttgtgtgtatttaataatcatatatacgtgtaatactaaagagattttcagctattaaattttaaaactgcttacatgtttaaagaaactgaagagtgagaaactacacaaccaagcagttatttggtctctgagatctatacttaaccctcttcagctattaatgttacctgcacactagggtatgaatcctcttttttttttttcaccccaagaaaatatacataatagattcaccgaacagcagatgtcagggtcatctttctttttaaagaattaagccatattttgtgagggccagaacttgcattatttagtatatttcccccttcccccaatggaaagcaaagttaaaggtaaagtacatatttcaaaacaattttattgacctctttatacagaattttacttggaaaacttgggggcttgaatgcattacataatatttatattgtattgagcttttttattcctcacactatatttacattaataaattgattgagaagtttatagtaaagggaaacttacagaacacttttgtatcatttaaaagatgacctgaccaaaaactttacaggattcataaatcagggatcattttgctattgacttcacagtaatcagtagttttataggtaatattatagttaatttgcagcattttagtacttgtattatttatttttggtcagaaatagtaaattaaaatattttttgatagtttataggtaataatcaacccataacttttaaaagaaacaaaacatttctattattgagttaacatttgattatacaaactaggaaaggcagggaaattccccttctccccagtgattctattaagatgacctttatgttaaactttcaaagtactttatgaatttagttaccagttactatttattaattgacaattttctgaaaaatcccgtttcagcagacttaatgaaggtgaaagcaacccttatgtgctttctacttatttgaatgttcctcaagnnnnnnnnnnnnnnnnnnnnnngaaggaaaagagaaaacagtgcctctgtttttagaaaactactgctcagtaaagttgtttaaaccatttctggtagctaatgacaattttatattaaattgtatactaactttagtgagactgatttttttagttgtttacagtacaaatacttgtatttgttttttaattgcagtatttccaatgtcgcagtaatttagtaaaactctgtggctgccttgattttgacagattttgttaatataaactgattgttaggcaattagttatatttatgcataaatcaattgcactataattcatgaattatttattacaatattttctaatgaattcatgtatctgtcttgtgttgtaaatgtactgtaattctgttcctactttgtgttgttatatatctaaatctgattgtatgaattttaattgttcagttaacgtgtttctaggttgtaatttgtagtaaagcacttcaatgcttttgcacttaaatttacaacactgttggtgtgtgattgatttactcattcagtaaaagaaaaaaagaaaagaaaagaaaaaaactgaaa

SEQ ID NO: 2068 - protein, 33 aa, Homo sapien
  Unsure 1495-1516: Unknown amino acid
NELQISFWWAIHYHFANNQICSLFRVLNRFTNI

SEQ ID NO: 2069 - DNA, 292 bp, Homo sapien
taggagaggctttttaaaaattataaatttcaagcctttttttctgattatgaaaaaatactgtatatatcataaaaatgtacgcaaggaaaaaataaagattgctatgattctgttaccttcaggtaatcactgttaaatttggtgcattttatcctaacctgtaaagttatgttatttttaaaaacaaaattgagattataatgtttatattacttgtaaattttttccatcttaatatgttagccttttcagtgccattaaatttggccatatgtaactgaagcttaag

SEQ ID NO: 2070 - protein, 45 aa, Homo sapien
RRGFLKIINFKPFFLIMKKYCIYHKNVRKEKIKIAMILLPSGNHC

SEQ ID NO: 2071 - DNA, 524 bp, Homo sapien
ccttcacagttacaaaaaaaagtgctaatttttgctgttaaattctggttgttatttaattgacagaagtctcttgatgcacgaataaatatctctacatctagcctttgttaaaaataaaaattaatattctacaaacacctacatatactagagaggggtgaaacactgcagctaattcctttataatactttcagatgattgcattaagcctttcatgttatgtggcattgttaatttttcctagatacccatccacttaagggccagagaaatccttattcatttaactctggtgggcatttatgtaacatacccaaataaaaacgttattaaacagccacaatcgcattcagtcaacttggcactgaatgtagcttctaaaatcagttctctaccctacgaatggaatgttctaccaagaaagagaagcatcaccatgtcatcttgtgttctacaccactatagagagttacagttgcccccaaacacgaatgctattcccaaataaaatagaatcatg

SEQ ID NO: 2072 - protein, 36 aa, Homo sapien
MFYQEREASPCHLVFYTTIESYSCPQTRMLFPNKIE

SEQ ID NO: 2073 - DNA, 754 bp, Homo sapien
  Unsure 87-205: Unknown base
gaactcatgaaaggtttttgttgttttgtactctctcaatccatggacactaaaagtacaaaaagctgtttgtgggcatgtaagacnnnnnnnnnnnnnnnnnnnnnnnnnnnnnnnnnnnnnnnnnnnnnnnnnnnnnnnnnnnnnnnnnnnnnnnnnnnnnnnnnnnnnnnnnnnnnnnnnnnnnnnnnnnnnnnnnnnnnnntgctgctatcaaaatcaagcccaaccagaggtagaagagccaagaagcctgggttctcatcctagctctgtctcttctgtctctatctttgtgatcttggactgtcaattccccttcctgtgatccattttactgcaaacataagggttgcagtaaagggttgtctcacgtcttctgctttaaaagcctataaatatatgacctgaaaactccagttacataaaggatctgcagctatctaaggcttggttttcttactgtcatatgatacctgggtctaatgaactctgctgagatcacctcaagtttctgcggttggtaaagagaacaagggaagaacaaacatcccttttattgctccaaatggtgatttaatccctacatggtgctgggtggacaatgtgtcactgtcacatgcctttactgtataaatccaaccttctgccagagagaatctgtggttctggccatggagggaggatagtggaaatgatatagttggactggtgcttgatgtcactaataaatgaaactgtcagctggaaaaaa

SEQ ID NO: 2074 - protein, 89 aa, Homo sapien
  unsure 30-69: unknown amino acid
  Unsure 87-205: Unknown amino acid
ELMKGFCCFVLSQSMDTKSTKSCLWACKTXXXXXXXXXXXXXXXXXXXXXXXXXXXXXXXXXXXXXXXXLLSKSSPTRGRRAKKPGFSS

SEQ ID NO: 2075 - DNA, 1199 bp, Homo sapien
aaagcattttccagtaatttgatttttctggcaccctaactaagggaagttggctttttaaattttactttgttgcagaagattaaatttaaggttgagttccactttgtttgcaatagtttgaaaaagaatagttaatgcagattttttttttaaatttttttccttttaagctttgtgtcttgtacaatgtgagtttgccaaattttcttcatctgctacagattaggtatgccattgttgctgccatgtggcggcgcaccccgtgcttcttaaacgcactgactggaggtttatcgcatcacttgttcacatgcacggagcctggtaacagcctcatctgtatcttgttagcttcattttcttatttttaaaatttcattatttataaactcaacatagcatttaaaaataaaggctagttttaattaattaatgttactacaaaaagtcattgctaaaattttcatagtgaaacagattttaacttttgttaaaatgtgctatgctttaattaaattgtatttactctacaagcagggatgttttacctgccattttaactgtatttgccaaattctaaatataattttgaaaattgaaattgaagcttatgtttatgtggcaaaagtaagcttcaggactgggctgtgtatttttattggcatgtaacagttaatatgagctctacaagaatttgtttttaaggagctaaagctatcaacagctgcagatttaaaaaattatatattaaaactgttaggttagctcagttgtacaacttagtgaatcttgtatcctgagtttctgaaggctggtggataggtatctctgaaatcattgtgttttagtctttttactgatagttttgtatagggaattcatcttctcttttaaaataacttttttcctttaatttatttctattacttattgtacataaattttaaaataaaaaataaaagaaaaaaagtcacttgtctatcacctgttaatagtttaaacattttggtttatttccattcatccttcccccccatgcattatttacatatttttttttctctgtaggcatattttaatttggatcacagtttactacttagtatctccttttcatgacatttgtaatttccctggtcattatttttgaaaatgagatttcttcatggttttatttcattttattttcatgcctg

SEQ ID NO: 2076 - protein, 78 aa, Homo sapien
MQIFFLNFFPFKLCVLYNVSLPNFLHLLQIRYAIVAAMWRRTPCFLNALTGGLSHHLFTCTEPGNSLICILLASFSYF

SEQ ID NO: 2077 - DNA, 464 bp, Homo sapien
  Unsure 146-250: Unknown base
cctctgacctagtctctttgagtatgaagacctatttactatgtaaagctgtcacctgccttgaaaagattaagacagcaagaaagttcttagaaagtgggtatgtggctggcctcagataaggataaattgctgagaagaaggannnnnnnnnnnnnnnnnnnnnnnnnnnnnnnnnnnnnnnnnnnnnnnnnnnnnnnnnnnnnnnnnnnnnnnnnnnnnnnnnnnnnnnnnnnnnnnnnnnnnnnnncgatcacatccagatgtcctgttactggaagggcaccatagtttatcctgcacctaacactaatacacctactctgggaattcttctacctacaactatttatttatctgatcccatctggtattaaagttctaaaagttaacagaattcttaaaggttcccaatgcctcccagaaaccccatcatctcaaaatcactagctattaaaagaagc

SEQ ID NO: 2078 - protein, 62 aa, Homo sapien
  unsure 15-50: unknown amino acid
  Unsure 146-250: Unknown amino acid
MWLASDKDKLLRRRXXXXXXXXXXXXXXXXXXXXXXXXXXXXXXXXXXXXITSRCPVTGRAP

SEQ ID NO: 2079 - DNA, 1855 bp, Homo sapien
attgttgtactaattgttgataacaaggaaaactctgaaaagcaagtgtttttgtaagtgatctgaactaagctgaagttgtttataatcttatttatcccatatggtgtaaatattcacaggttttcctgcagatatattaacatgttttgttatggggtgcttttttagatccctcatggagattatgtaacatatgatacataggtaccaaattacctttttgaattaaaaaaaaataaactgaattccaaaatatatcttcttccagagatttctggataagtacttgtggatctctatgagcaccatgatattatttctctaaagtgaacaatcataaatcatattttaggaatatcctagtttgttttacagtcatttgcaggtttctctctgtgtcagctagcctgatcttaggtcttcttttcatccaatctgcttagttaagcccatggacctaaactgatttatttctcatctgttcagcctgtgtcagtggaaggtgcactaggcttttctgatcagccaaggctaatcagagttggagtacagaccagaattcaacaaaggatacagtcataaattagggttaggtttgcaaatacttttataatgtggaaattagagtttaaggcataactaatgaagcaaacagaaaataacatgggaaaacaaagttatcaaagtcaggaaagacgaaaatcattgttcccgtctcataaggtaggactggagaggcaaatcaccagtgttaaatctttgtgcacattttaatttacttataataaatttctgaagttggaattgacctgtcaaaaggcacagacattttatagcttttgatatgcattaaccaaatttcccaacagagatttataccaatttacattctcccaggaatgtgtgaatgtccctttcctcaatttttagcatttttaaattatttgccagtttatcatttatctttttctaatttgatgaatgaaaaatagtcatgtggtactttgctttcattttttaattaccaatgcatattagctatttgtatttcttcttttaggatccagtgtattttgaatttctagaacttaaattataactccttatactcaaatttatacacaaaaacactccaaagacagatgttagtaatttggctatgggcatgattgaaaattgatttctgaagtatacttggaaatgtggtaataaggttgttttgagtggaatattgttagaacatatttatatattataaaatattttttggatttcagaagaaaactttcaccttattttttaatgttctaagtctttactttttaactactacctttaaattgagccttatttataattgtcctatgaagttatattgtatcattctgtgtttgttgcagtatcatttaattgttttgtaaaaagctacattgcaacacaataaaatacttcaatgcttacaataggtaagtcttgaaatagtatcctgacatggtattagaaagtcttatctgcagaataacacaaatgcacaccaggatatggggagggatgagggcggaccagagaccagaagagctttgtttttatgaggagaaagaagggaatcacgctactcttgttgactctttactccaagttcattcttcattgctaatgtctccaaatagtgctaccttaggattgatttccagaatgtttcttgtttgtattattagaaagttaaataagtaccattgtaattttgaatatactttcaacagcatggtagaatatatgccatgtggtaatagtagtctttgtttccatttaagctttggcaaatctcttttagtactaattagtttaaaaa

SEQ ID NO: 2080 - protein, 99 aa, Homo sapien
MRADQRPEELCFYEEKEGNHATLVDSLLQVHSSLLMSPNSATLGLISRMFLVCIIRKLNKYHCNFEYTFNSMVEYMPCGNSSLCFHLSFGKSLLVLISL

SEQ ID NO: 2081 - DNA, 4815 bp, Homo sapien
gagcagagccctttcacacacctcaggaacacctttcggctgcccgctccccagacacacctgcagccctgcccagccggctttgctcacccactgcttgtaaatgccccagatatgagccagcccaggccccgctacgtggtagacagagccgcatactcccttaccctcttcgacgatgagtttgagaagaaggaccggacatacccagtgggagagaaacttcgcaatgccttcagatgttcctcagccaagatcaaagctgtggtgtttgggctgctgcctgtgctctcctggctccccaagtacaagattaaagactacatcattcctgacctgctcggtggactcagcgggggatccatccaggtcccacaaggcatggcatttgctctgctggccaaccttcctgcagtcaatggcctctactcctccttcttccccctcctgacctacttcttcctggggggtgttcaccagatggtgccaggtacctttgccgttatcagcatcctggtgggtaacatctgtctgcagctggccccagagtcgaaattccaggtcttcaacaatgccaccaatgagagctatgtggacacagcagccatggaggctgagaggctgcacgtgtcagctacgctagcctgcctcaccgccatcatccagatgggtctgggcttcatgcagtttggctttgtggccatctacctctccgagtccttcatccggggcttcatgacggccgccggcctgcagatcctgatttcggtgctcaagtacatcttcggactgaccatcccctcctacacaggcccagggtccatcgtctttaccttcattgacatttgcaaaaacctcccccacaccaacatcgcctcgctcatcttcgctctcatcagcggtgccttcctggtgctggtgaaggagctcaatgctcgctacatgcacaagattcgcttccccatccctacagagatgattgtggtggtggtggcaacagctatctccgggggctgtaagatgcccaaaaagtatcacatgcagatcgtgggagaaatccaacgcgggttccccaccccggtgtcgcctgtggtctcacagtggaaggacatgataggcacagccttctccctagccatcgtgagctacgtcatcaacctggctatgggccggaccctggccaacaagcacggctacgacgtggattcgaaccaggagatgatcgctctcggctgcagcaacttctttggctccttctttaaaattcatgtcatttgctgtgcgctttctgtcactctggctgtggatggagctggaggaaaatcccaggtggccagcctgtgtgtgtctctggtggtgatgatcaccatgctggtcctggggatctatctgtatcctctccctaagtctgtgctaggagccctgatcgctgtcaatctcaagaactccctcaagcaactcaccgacccctactacctgtggaggaagagcaagctggactgttgcatctgggtagtgagcttcctctcctccttcttcctcagcctgccctatggtgtggcagtgggtgtcgccttctccgtcctggtcgtggtcttccagactcagtttcgaaatggctatgcactggcccaggtcatggacactgacatttatgtgaatcccaagacctataatagggcccaggatatccaggggattaaaatcatcacgtactgctcccctctctactttgccaactcagagatcttcaggcaaaaggtcatcgccaagacaggcatggacccccagaaagtattactagccaagcaaaaatacctcaagaagcaggagaagcggagaatgaggcccacacaacagaggaggtctctattcatgaaaaccaagactgtctccctgcaggagctgcagcaggactttgagaatgcgccccccaccgaccccaacaacaaccagaccccggctaacggcaccagcgtgtcctatatcaccttcagccctgacagctcctcacctgcccagagtgagccaccagcctccgctgaggcccccggcgagcccagtgacatgctggccagcgtcccacccttcgtcaccttccacaccctcatcctggacatgagtggagtcagcttcgtggacttgatgggcatcaaggccctggccaagctgagctccacctatgggaagatcggcgtgaaggtcttcttggtgaacatccatgcccaggtgtacaatgacattagccatggaggcgtctttgaggatgggagtctagaatgcaagcacgtctttcccagcatacatgacgcagtcctctttgcccaggcaaatgctagagacgtgaccccaggacacaacttccaaggggctccaggggatgctgagctctccttgtacgactcagaggaggacattcgcagctactgggacttagagcaggagatgttcgggagcatgtttcacgcagagaccctgaccgccctgtgagggctcagccagtcctcatgctgcctacagagtgcctggcacttgggacttccataaaggatgagcctggggtcacagggggtgtcgggcggaggaaagtgcatcccccagagcttgggttcctctctcctctccccctctctcctcccttccttccctccccgcatctccagagagagcctctcagcagcaggggggtgctacccttacgggagtgagagtctggtgagcccactcttcacccgtcaggccctggccgcaatggacaagcctcctgctcactccaccccacccacatctgccctgtccttggcagctgaaggacaccttgacttccagcttttacgagtgagccaaaaacagaaggacaagtacaactgtgctggcctgctgtacaagcttcaaaaagtgtcccagagcccgcacggctcggtgtcagatggtgtcaggctgtcacggacatagggataaacttggttaggactctggcttgccttccccagctgcctcaactctgtctctggcagctctgcacccagggaccatgtgctctccacacccaggagtctaggccttggtaactatgcgccccccctccatcatccccaaggctgcccaaaccaccactgctgtcagcaagcacatcagactctagcctggacagtggccaggaccgtcgagaccaccagagctacctccccggggacagcccactaaggttctgcctcagcctcctgaaacatcactgccctcagaggctgctcccttcccctggaggctggctagaaaccccaaagagggggatgggtagctggcagaatcatctggcatcctagtaatagataccagttattctgcacaaaacttttgggaattcctctttgcacccagagactcagaggggaagagggtgctagtaccaacacagggaaaacggatgggacctgggcccagacagtcccccttgaccccagggcccatcagggaaatgcctccctttggtaaatctgccttatccttctttacctggcaaagagccaatcatgttaactcttccttatcagcctgtggcccagagacacaatggggtccttctgtaggcaaaggtggaagtcctccagggatccgctacatcccctaactgcatgcagatgtggaaaggggctgatccagattgggtcttcctgcacaggaagactctttaacacccttaggacctcaggccatcttctcctatgaagatgaaaataggggttaagttttccatatgtacaaggaggtattgagaggaaccctactgttgacttgaaaataaataggttccatgtgtaagtgttttgtaaaatttcagtggaaatgcacagaaaatcttctggcctctcatcactgcttttctcaagcttcttcagcttaacaaccccttccctaacaggttgggctggcccagcctaggaaaacatccccatttctaacttcagccagacctgcgttgtgtgtctgtgtgttgagtgagctggtcagctaacaagtcttcttagagttaaaggagggggtgctggccaagagccaacacattcttggcccaggagcattgcttttctgtgaattcattatgccatctggctgccaatggaactcaaaacttggaaggcgaaggacaatgttatctgggattcaccgtgcccagcacccgaagtgccaaattccaggaggacaagagccttagccaatgacaactcactctcccctactccacctccttccaagtccagctcaggcccaggaggtgggagaaggtcacagagcctcaggaatttccaagtcagagtcccctttgaaccaagtatctagatcccctgaggacttgatgaagtgatccttaacccccaagtaatcattaacccccagaccagcctcagaactgaaggagattgttgacccagtgacctggagttgaggctcagggagagatctgccacatgtctgagggttgcagagcccgctgtggaggtaagattggaaacacatgaggcagagggaagacattgaagaaaacatctctgctggaatatttggaaaagaacactcttctggacctggttgaagcaggaaagatggaggcaaagtagtgaaataatccagaatttcaatgcttttgaatgttcttagtgatactgacctgtgataatataattcccagggaggactgggaaccttatctcttgagatatttgcataatttatttaatttaagcctcattctccttttgttcattttggtaataaactggatttgaattgtgaacaaaaaaaaaaaaaaaaaaa

SEQ ID NO: 2082 - protein, 887 aa, Homo sapien
MSQPRPRYVVDRAAYSLTLFDDEFEKKDRTYPVGEKLRNAFRCSSAKIKAVVFGLLPVLSWLPKYKIKDYIIPDLLGGLSGGSIQVPQGMAFALLANLPAVNGLYSSFFPLLTYFFLGGVHQMVPGTFAVISILVGNICLQLAPESKFQVFNNATNESYVDTAAMEAERLHVSATLACLTAIIQMGLGFMQFGFVAIYLSESFIRGFMTAAGLQILISVLKYIFGLTIPSYTGPGSIVFTFIDICKNLPHTNIASLIFALISGAFLVLVKELNARYMHKIRFPIPTEMIVVVVATAISGGCKMPKKYHMQIVGEIQRGFPTPVSPVVSQWKDMIGTAFSLAIVSYVINLAMGRTLANKHGYDVDSNQEMIALGCSNFFGSFFKIHVICCALSVTLAVDGAGGKSQVASLCVSLVVMITMLVLGIYLYPLPKSVLGALIAVNLKNSLKQLTDPYYLWRKSKLDCCIWVVSFLSSFFLSLPYGVAVGVAFSVLVVVFQTQFRNGYALAQVMDTDIYVNPKTYNRAQDIQGIKIITYCSPLYFANSEIFRQKVIAKTGMDPQKVLLAKQKYLKKQEKRRMRPTQQRRSLFMKTKTVSLQELQQDFENAPPTDPNNNQTPANGTSVSYITFSPDSSSPAQSEPPASAEAPGEPSDMLASVPPFVTFHTLILDMSGVSFVDLMGIKALAKLSSTYGKIGVKVFLVNIHAQVYNDISHGGVFEDGSLECKHVFPSIHDAVLFAQANARDVTPGHNFQGAPGDAELSLYDSEEDIRSYWDLEQEMFGSMFHAETLTALESLSAAGGCYPYGSESLVSPLFTRQALAAMDKPPAHSTPPTSALSLAAEGHLDFQLLRVSQKQKDKYNCAGLLYKLQKVSQSPHGSVSDGVRLSRT

SEQ ID NO: 2083 - DNA, 426 bp, Homo sapien
cttttgtatgttaaatgtgattatacttctctttgacttgtcagcttagctttagctgatacactctggtgcccaactattattgtatcagtgaacttccactttcttttccttttctctcaatttttgttgtatcattcctaccttgtgaggacatataatatttacattctgttgtcatcctcacatttcttagttccacagtttaaatgtatttgaaactcaaaacattcccattaatctcttggtcagctgaaattaatgatttaatagtttccttaaaaaagactcatggaacaatttccctaaatttttgccatgtcaaatatgtttatctgtagcctttacacagtaaaaacaatttggctagataatacaattctcagttcatatttttctttggaatattaaagtattgctatagag

SEQ ID NO: 2084 - protein, 15 aa, Homo sapien
FCMLNVIILLFDLSA

SEQ ID NO: 2085 - DNA, 212 bp, Homo sapien
cttttcatatttccccatctgctttatggatcaactctcaacagtacactttttcttttctttacctaccctatgagtgcaacccagatgtaagagttaatcctcgtcagagaatcattgccttaaacctctcagaaatatgtaattaggaaatcttattttaattttttaaaaattgcttgtatagtttcaaagaataagatctggcaaat

SEQ ID NO: 2086 - protein, 48 aa, Homo sapien
FHISPSALWINSQQYTFSFLYLPYECNPDVRVNPRQRIIALNLSEICN

SEQ ID NO: 2087 - DNA, 796 bp, Homo sapien
  Unsure 215-281: Unknown base
gttactgttgctgagaaatctaaagtcatttgatttctaatcctttgttttctgaccttttttgtttctatttagaaactggattttgtctctactgttaggaatctttgcaatgatatgcctgcgtaccttacactgagcacttggtggacattatcatcctggaaactgatttcctacagctcagtactttaaaaagttattttattgatgannnnnnnnnnnnnnnnnnnnnnnnnnnnnnnnnnnnnnnnnnnnnnnnnnnnnnnnnnnnnnnnnnnaaattaaaaaaaaaattgcttggaataaatactgttccaagtcaattcagtacacatacttctttctgtataatttcatgtggatgttccgtaattttataattttcctattctgggcatttaagtgatactgatatatccatatttatatgttatgcttttttggttgagggggaggatattcttaaaagtgaggtttttgtgagtaaacaaaattgagtattttcaaggaaaatataaattaccaaagtgactcaagcagtagaaaatctaaagagcccagaaatcatagaagaacttgcaaaggttgtaaggtctaaaaatctgaagtgttactaggtccatatggtgttcttggtgcagtctgtataattttaaggaaagaacaaaaattaaactgttgtcagtagtttggttagtgaactatttcagagcagatgaaatagtggtaagtactccaatccattttacaaatcctctgtaataccactaccaaaactgttacagatagcaaa

SEQ ID NO: 2088 - protein, 25 aa, Homo sapien
  unsure 2-24: unknown amino acid
  Unsure 215-281: Unknown amino acid
MXXXXXXXXXXXXXXXXXXXXXXXN

SEQ ID NO: 2089 - DNA, 851 bp, Homo sapien
gcactggaacaagttagttaatgggtcttgacattagatgagtgcttgtgcagctcaactcctccctgctctccaaagaagtgtccttctctgatatgggcagcatcacaatccagcctcaaaagaagccaccttgagcttccaagacacaaagcaggggatatggagaggtgtctgcactagagtctggatggtgctactgacaacagtgagtgttcagggtgactgctagtgctgtgcagtgctgagcgccacattccatgggaccacgtgtcctttaataaacatattcagcgtgcgcttatggaactcatggcttctaaagcacaaggcgtatgtttcaagcatagtgctatccctgagcagcatttgtaagcctccagtctgcaacagtgggattacctaccaggctcagctgatggaccgggatgatattggaagagaggctgccagcctgaagacttacctggaaacattttctcgttggtctggttttaataaaatcaccagattccactagaaggaaaccaaagattacaaaggtccaaattaatatatgacaaagtagaaacggaaactgggaggaaatgaggtgaaacacaggggatgatgtattggaaatagggaatgaaaaccgtacagagtagaaacacctgaaagcagttctggaaactccacatgctcctgctgtaccaagacctggtcctatgtgtgctgaccttgttcttctgctcacatctgccacatctgcaaatgtggcaacattttagctgttttctattaacactgaagtactctgagagcttggaaattttcaagtgcaaaatcaggtccagagaacagtaaaaaaa

SEQ ID NO: 2090 - protein, 9 aa, Homo sapien
HWNKLVNGS

SEQ ID NO: 2091 - DNA, 1098 bp, Homo sapien
cccaaacaaaacatactctaatcagggcagtcgaacttgaaaagagtcagtgagaaatctgaaaggaggaaaagcctggccacgaggctccaagtgaaatgaaagccataaacaccagcttcgtcaaccttgaaagcttctaaaagtgcccctaagcctccttttgaatcactaaaagttttcacttacctccctgtctttctcagataaaatttcctctttctcagccatgagtcttaaaaaacaaagcaaaacaaaacacttcacacctgcttcttattcagttttacactagtggaaagagaacgggatttagagttggaaggccaacgtgagcgtcctgctgccacttagtagctgtgtgactctgtataagcttctaggctttctgtgctcaatttcttcaaccgttgacaatatgaccgtgtatcatcacataatacactatgatgtgaagtttatgtagatgaagaactctttcaagctcacaaagcaccagatacatgtcagatatttctaatgttacaccagtttttaatatcatgtttcatttcacatacggtacttgatatctcaattacattagaggctaagacagttttctaccagcatgagaactgaaacacgatagcatgccttttatggcgaaatgtgtttgaacttcaaacaacaaatatataaaacttattatgcaatacaccctatcagcaaattaattgaaggctgcctctagattgttaggtgtggacgacaggaactttatttcctacttcttttgtacatgccattgctgtttaacagtgttgggttcataacaggtgattagacagtcttgttgatagtttggagaaccatcttaatcatgacctagaatcattcttatttcacagcaacctgtgtcttgactaatgttaaactgactaatttgttttgaagctgagaatgagaaattggaggtccttctcatagatctgagattcctttttattcccgagttggataaattagggtaaacaaatcaaatacttgtaaaaatactgtacaaaggaatgacatatgcatgctggttccctagcagggtaattccatcagcgcttt

SEQ ID NO: 2092 - protein, 16 aa, Homo sapien
MTYACWFPSRVIPSAL

SEQ ID NO: 2093 - DNA, 2265 bp, Homo sapien
ggggaaaatgagaattagcaaatagagttgaaggtgtgtctcaaaatggattgtattttatatagcctattactataattattcttataacagggcttgttttcctctattagactgcaaatgtgttggttactgaggcggttgcacttgtttttgtatcacttatgaaacctagtatagtgctttgtattatagtaatcattcattagatattatgtgaatgatttgaattatatttcatagtagctcaaagttagtcttgatggataaatgaatgtaatacaaccatatacattattagtaaggaacttaataatatcatgaagtatctttaaccaaagtaataattaaaaagtaggagtaaaccatagtaagttcaaatttagaatttgatagataatggagattactttttaggcctaaatattgaaggatagatgtttatgaaactttgaggttcaaattatttgtagaaatgtttatttaatattatattcaagatattaaaatgacaacaataggaaaatgtataagagatttgttaaacacatcctgaaagcatggaaataaccatatatcttagcctaatgcatgaaatagtatagcaaatataagcaggatgttttcatttttattttaaaattgtgtttatcactggatagggataataaatttattctatttattttttgctgttaaacatatactttaataaactaaacacatttgtttctgcagtggatggaaatatgtttgtcacaggtaaaattgtcacttgggtaaattttatctcaagcaactcctttttagttttaatactttctatgttgcccaaatcaagtcttatttccatgaatcactattttatgtaataattttcttggtgaggtcaatttacatagttttggtactttcatgtcagatttctaaggtagtataatttagtttagaggaaggatttctacacagatcatgcaattgtctcttcattatatatcagggtaaaatctacaaaaaacaaaattggtttgagaacaaagctgtcattacttgcaagatgaaaacagaaaaattgcatgtgtttattaaaacacagaagtatattcctgtgcaaatttaatgcagattctgaagtgaaagacaggacttttgagagattttgagtccaagggttcacctcttcaaacacaactgaaaaaactctattttttttatttttaaatctaatccagtttatatatgcccaggtccagcaaaaagaagctgggttgataatgtgttttgcagttattcaagctagtttgaaagagtacctggcagtgattgtgaagaccaatgattgtgctactaaggtctctcaattgccagacacccaccaagtattttttaaatatgctattctgttttgaaactcaaaaccttgtatttttgttaatctagttacctgccaaatcaaacaggaatccaaagtttcataaccctgctgtgttctctggttactagaaataagcatatttttgatgttttaacaaccttttaaaataataatttctaataatgaaatagaatatttctattttaagtagctattgggtatatctttacataactagatgattatattaaatgggttttttagatgaatgatgtgcatgggtagatatttttaaaatgaaatatgttttttccttttttacttaaatttctttttagaacatactgttatgaacattaacatttattcaagtccttgggacaattcttcttcagttacccagtaaaattttcatgatctctgcaaaacatagattagaaatataaaataagataaattttagaatacagtgagatgacttacacaatttgataattttttatataatattttatgattaaccagttaactgaaacctaaaaacctgtattaactgattaatattgcagcaaaatgtcagttcatgttattgtatcaatcacttatggatacatgattatgctgtcgtgatatgatttctaacaattgtcttgtcatttttagcttttactattataattttaattaaaatatattaaagtcactatgtcataacagactttatattgtgccatgcagtcctattgctcttttgtttcaaatatcatatagtctaaagcaatgattctcattaaatacatgcatcaaaatcaactgcagttattacatgctaactcaaacttacaaaatcaagctctctgtgatcctggttaatacatctaagtacttga

SEQ ID NO: 2094 - protein, 21 aa, Homo sapien
MLTQTYKIKLSVILVNTSKYL

SEQ ID NO: 2095 - DNA, 204 bp, Homo sapien
ccctcatcctgcctcactccttagcagctagtgtgaacgtgaagaattgagaaatatagtgatcacatcagtgtgtattcattctggtcagcaaactaggcatatcttaagttttttaggaaatcactgttggcctccttttgtgtatcatagtgcaaaacagttttaattagttgaattattatagatacacaagaatttaga

SEQ ID NO: 2096 - protein, 15 aa, Homo sapien
LILPHSLAASVNVKN

SEQ ID NO: 2097 - DNA, 5353 bp, Homo sapien
  Unsure 3400-3549, 3605-3777: Unknown base
cacttcccataactgggtgtccagagaggctgctactgctgacacatcatccttggctgaacctgactggttctttgttcataaagacacttgagcccttatcaaggtcaacaacagtatccatcttgctaactatggtggtcaacattcagtcttcttacttgttctattaactgcattcagtggctgattagcccttgcttcactcagcttccaggacatgattccctggttgctcctcctcagactgctttactagtttcttcttgtcctcccagcttccaaatagtgggaagctccaggtatcagtccttagagctcttctctattcctgacggtgcagccgcaaggcatcgcaggggccccgcgctactgccctgctccctcaaagtcccaggtcccctcccctggtgctgatcattaaccaggaggccgtataaggagctagcggccctggcgagagggaaggacgcaacgctgccaccatggacagtagcacctggagccccaagaccaccgcggtcacccggcctgttgagacccacgagctcattcgcaatgcagccgatatctccatcatcgttatctacttcgtggtagtgatggccgtcggactgtgggctatgttttccaccaatcgtgggactgttggaggcttcttcctggcaggccgaagtatggtgtggtggccgattggagcctccctctttgctagtaacattggaagtggccactttgtggggctggccgggactggggcagcttcaggcatcgccattggaggctttgaatggaatgccctggttttggtggttgtgctgggctggctgtttgtccccatctatattaaggctggggtggtgacaatgccagagtacctgaggaagcggtttggaggccagcggatccaggtctacctttcccttctgtccctgctgctctacattttcaccaagatctcggcagacatcttctcgggggccatattcatcaatctggccttaggcctgaatctgtatttagccatctttctcttattggcaatcactgccctttacacaattacagggggcctggcggcggtgatttacacggacaccttgcagacggtgatcatgctggtggggtctttaatcctgactgggtttgcttttcacgaagtgggaggctatgacgccttcatggaaaagtacatgaaagccattccaaccatagtgtctgatggcaacaccacctttcaggaaaaatgctacactccaagggccgactccttccacatcttccgagatcccctcacgggagacctcccatggcctgggttcatctttgggatgtccatccttaccttgtggtactggtgcacagatcaggtcattgtgcagcgctgcctctcagccaagaatatgtctcacgtgaagggtggctgcatcctgtgtgggtatctaaagctgatgcccatgttcatcatggtgatgccaggaatgatcagccgcattctgtacacagaaaaaattgcctgtgtcgtcccttcagaatgtgagaaatattgcggtaccaaggttggctgtaccaacatcgcctatccaaccttagtggtggagctcatgcccaatggactgcgaggcctgatgctatcagtcatgctggcctccctcatgagctccctgacctccatcttcaacagcgccagcaccctcttcaccatggacatctacgccaaggtccgcaagagagcatctgagaaagagctcatgattgccggaaggttgtttatcctggtgctgattggcatcagcatcgcctgggtgcccattgtgcagtcagcacaaagtgggcaactcttcgattacatccagtccatcaccagttacttgggaccacccattgcggctgtcttcctgcttgctattttctggaagagagtcaatgagccaggagccttttggggactgatcctaggacttctgattgggatttcacgtatgattactgagtttgcttatggaaccgggagctgcatggagcccagcaactgtcccacgattatctgtggggtgcactacttgtactttgccattatcctcttcgccatttctttcatcaccatcgtggtcatctccctcctcaccaaacccattccggatgtgcatctctaccgtctgtgttggagcctgcgcaacagcaaagaggagcgtattgacctggatgcggaagaggagaacatccaagaaggccctaaggagaccattgaaatagaaacacaagttcctgagaagaaaaaaggaatcttcaggagagcctatgacctattttgtgggctagagcagcacggtgcacccaagatgactgaggaagaggagaaagccatgaagatgaagatgacggacacctctgagaagcctttgtggaggacagtgttgaacgtcaatggcatcatcctggtgaccgtggctgtcttttgccatgcatattttgcctgagtcctaccttttgctgtagatttaccatggctggactcttactcaccttcctttagtctcgtcctgtggtgttgaagggaaatcagccagttgtaaattttgcccaggtggataaatgtgtacatgtgtaattataggctagctggaagaaaaccattagtttgctgttaatttatgcatttgaagccagtgtgatacagccatctgtacctactggagctgcagaagggaagtccactcagtcacatccagaaaaaggcagactaagaatcagaagccatgtgattgatgtctgacgtgagtctgtctcaggtagattccgggtgtcagtgtggtttataatccttgaatattgttttagaaactttggtctccctggttcctgccacttttcctgtccgtcctcctccccattttttttttaaaagaaagctgttttcccctcatcatatccctcttgagttttgcctggactttccctctcaagtgtgtcaatcaggtaaactgaggaatgcatggaagctgaggatggagcttgatgggctccctgtcctgggtgtttgctctctgaagtggaggcctgaggaaggtagtacttccacaaaagggagggacccgggccccagcctcaagctagtgggggaggcagatagcctgaatccaggggattttctgggcttcttaaaatgtccattgtgagttccctgtgtttgggattccactcattttggcattcacagtgcctggaatgtcttagattttcagcaatgcgtgttgaataaatgaatgacataggcatttatttttaaatctttgcttgctttttacatgagcctggcccttagttaaccttttcttgtggctacacaaagtatgctcactggttactaatgacttgggatgcatttgtcaaactgatnnnnnnnnnnnnnnnnnnnnnnnnnnnnnnnnnnnnnnnnnnnnnnnnnnnnnnnnnnnnnnnnnnnnnnnnnnnnnnnnnnnnnnnnnnnnnnnnnnnnnnnnnnnnnnnnnnnnnnnnnnnnnnnnnnnnnnnnnnnnnnnnnnnnnngcagatggtcatatctcactctgtcttccgtggccttccttttgtctgtgtcctannnnnnnnnnnnnnnnnnnnnnnnnnnnnnnnnnnnnnnnnnnnnnnnnnnnnnnnnnnnnnnnnnnnnnnnnnnnnnnnnnnnnnnnnnnnnnnnnnnnnnnnnnnnnnnnnnnnnnnnnnnnnnnnnnnnnnnnnnnnnnnnnnnnnnnnnnnnnnnnnnnnnnnnnnnnncagataaagtatgcattttggagatttccaagccagagtctcccgtgaaaaaggtaaacggaagcagttattgtgcagcaaaaggaaaaagaattacaaactgaacgtatgtaggtgaggcaaggcagggtagggcagggcctttgggtaggctgatcagagggtttttcaacaataaatcaatgggaatgcatttgttgctcccaggaccctggcaccttgactctggtactatagcatgtcagcaaatacaagcaaagcccaacactctgatttgcatttatgccaatctaaactatccggtgtttagtttgattttttgagtgcaggttcattcaaggaccaggttcccttgtgctcagggtgaagtagaaccagaaaacatcgttatccattcccagaagttttggaagagccttggtagaaaagcagaagctgctttgaccgtgaaaatatttgactcctatcagtttttggtcaggagaagatatccacctagaccaacctgaggagaaggctcagagtacagatataccccgagcaacgtgatcaatgtccttgaaccttcatttttcatctgaaaacagagacataaatgcctggctcacagatttaaatgttatacattgacagcatttatcagtataacatttatttaaataagtaggtgctcaataggtgttggtcttctaacttgtctacatcccatccccattccagggtcttcagaattgaaggagagatgttgtatcactgttagaaggctgctttgggacattctgcagcagggaggagggactgtcaacccctacaccatgaccaccaagttcctcaccttggctgagtccctaaactctctgaacctcaggttcctccaagcataatgcagacttcacagagctgttgtaaagattaggtgaggtcaattgatactgcttaaaaggcccggtccgtagaagatgcccaataaacattactgctttccccctcaccctactgcctgaaaaaatattacacctgtgagactgactttgagaaccagtgtgggtggggagttgtgcatataaactatttaatgagtaccaaacacaaaagtcaagcttgtaaaatatcaggccttgccccagaaagacaaataccacatgatctcactgatatgtagaatcttaaaaagtcaaactcagaagcagagagtagaatgatggttatcaagggctgggggagggagggactggggagatgttggtcaaatgatacaaaggtttagttaggtggaataagttcagaaaatcaattgtacaatgtatcaattatagttaatagcaatataacatatacttgaaaattgctgagagtagtgtgagtgttctaccacaaaaaaatatgtgcagtaatagatgttaattaccttaatttagtcatttcacaatatgtacatatataaaaatatgttgtatgccatgagtatatataattattatttgtgaatttaaaaaataaaaataatttccaaaaaaaatgacaggcactggacacgtagaggaggggccagaattaagcagatggggcctaaaag

SEQ ID NO: 2098 - protein, 664 aa, Homo sapien; identical to SEQ ID NO: 647
  Unsure 3400-3549, 3605-3777: Unknown amino acid

SEQ ID NO: 2099 - DNA, 890 bp, Homo sapien
gcaaatttttgttgggaagtggacattttgtgtgttgtaatatgggaactctgaaagtcagattccactgcctccctagggattactgttgttacttacgaaagctgcatttgtttagtgacttttccaaactgtctttgcaaagagtgtatatctggttgcatgcggtcactgaagtctctgttcttttatctctgtggtctttcaatgacttgacagagagttccttaaatgcttagatccaataagaaaaagaaaacagaaagaaaaaaagagtgttctctccctttaagttcacttgtctagtgccactaggtaggcaacttcagttcgggggtgtgcatgtgtgaaacagtggccagcgctctggcagctcctcagcaatcaaaagtagtgaacgaaacacataacttcaatttttggaggacaaagcccctatttcctgccctagcaccagcaagctgcagcagaaactgccatcccaacagttggttaccacagggatgggagctagagaatgataagatgctattccaaatgccaaaattcactaaaatttaccaacttttttcttcatcaagcactcttctggacactgcaagtgtttcattagaccccagagtcctaaaatatcacctcaagcagttcttgccatctcaatagttactttggtgaagatactaactcctgaagttcctactctgtcatcttgacctatgtccttaattttcagcaccgatttagttgatccaaccctccttctcagtgtatgcgcgcacacacactcatccaatctgttctctacacagaaagaaccctttgtaagtgccagtgcctatgtttttttcacttaaaagataatttcattcttaacatggaaaaagcggagt

SEQ ID NO: 2100 - protein, 78 aa, Homo sapien [sequence omitted]

SEQ ID NO: 2101 - DNA, 1228 bp, Homo sapien
gaaagtttgttgttgttaattagatacaagtagagctgtttgaggggtagagggagtcccataagtgttccaaagaatctttagggtctgtggagccgggtttttaaattgaaaaatggatgacccctttgtagacctacttttaaagtttttgcataagagtgttttgtacctttggttcataatgtacttggtcagtcttgatacctgcacggaagaggtcctgtgcatactttgtaaaactgagaattaagatacttatatatatgtccattgttgaaataagaccaacagaaaagatgacccatttaagatagaatgtataaaatagcacaaatataattaccctatgcaaaatggattcagtaaaataatttttattacaaggcttgccaacctctggggaagaaagagctacctgtcacttacccgagttttgaaatccaggtatatgtacatgatagagtgcagaaatgtgctgttaagtctctggttggaaagaggatgaacctgctattttcatctcttcttggtgggaagaaaatcttaggggcgtatcattttagtaaccatcttggagatctgtcagtaagaactggaaacctactgccaagttccagtttactagttaggaacatcagcttttaaaaatcggtctttgttagtaatgccaaatgccttttaaactcataggcccacatagactttttgtataggtaattcagatcggggatgaaagtgtagtgataaaggcctgaactgttaaccttgatgacagagaagtggaactcactgtgtacagtctttctaagataaaatgtgtttggattaaataatgtatataggatattgtttagttctgattgtttatagtaaaagcattgctgtcagtgaggcagtatagtgtagtgattgcaagctctggaagtatactgccaaggtgtgcatcattcctctgtactgtgtagaatggcaaaagcaaccttaagaggtagactgtatctttatgtagcaaattaaattatgatatactttgcgttatgtctaacacaaatgatcaataaaggctagctgctgttataatgaatttcctttcagagacattagttatgtgctcagtaatctttttgaaatgttcttttttattttttaagaatagttaaaaagtgtcctattccctgtccatccctggcccaccatggttttcttcaagattatctttaaaaaa

SEQ ID NO: 2102 - protein, 9 aa, Homo sapien
MVFFKIIFK

SEQ ID NO: 2103 - DNA, 1149 bp, Homo sapien
  Unsure 71-91, 223-251: Unknown base
aaagtggtctgcccttccactgaaagttgtagctttttgacagtctcagccatataaacaggatctcagtnnnnnnnnnnnnnnnnnnnnnagaggcacaaggtctcatctcttttccttttgggcattaaaaccaaagttcatacattattgagacaggccgactctgctaaggcagcctgttggcctttaagttttattgcttattttttgagtatgtatnnnnnnnnnnnnnnnnnnnnnnnnnnnnnttgagctttaagccttcaagtttcctttttattcttgacccctagacatttcctttgcttgtggactcgggtatttgtttttaggtaatattttttttccctatgacacagccctcaggagatcctgagaacatgtgccctcatttttaggtaattttaattaggaagggttttaggttgtctgatctgccttgttgctagaaacagaaattctcctattgattgatttttcaaaccacttcttagtggcctctacaactactccagtcaggtcaagaatggctctcacattgccaagtcagtgggtatttttagtcttcatcttagatgacctttatgcacatttgtctttgtctaggaacttctgttggaaacatcttctattttaatgttattttaaatttttttgcttttgtaacattatgcttagcatgtgtgtccaactctttgacaatttctttttagttttctggtggcttccctttatccaaatttagtattgaaattcctcgagccgctgcttttctcactccataattctggccagaatttggtacttaaaatattttgtctaaaatattacaatagctacttaagtcatctccctgactccactctgttgtctttcagggcgtcgtccacactgtagccaaagtgatcttataaaaacataattctaatcatggcactcttctgcttaaaaatgttttaatggctttccgttaggttaaaatttaaaagtcctttgtagcctgtgagactctacatgagttgactccctagcttcatctttgagcatcttatttctttacttattataccatcagttagagttgattgttatataatccacagaagtgaattctgtccgatttaagcaaaaaaaaaaagtcgacgc

SEQ ID NO: 2104 - protein, 18 aa, Homo sapien
  Unsure 71-91, 223-251: Unknown amino acid
KVVCPSTESCSFLTVSAI

SEQ ID NO: 2105 - DNA, 3804 bp, Homo sapien
  Unsure 607-674, 2124-2188: Unknown base
acgaatttagaatataggtagtgttcttggaatacttttagaatatgttggaataaagtcatcctttctcattttctgaaaaagcagggaagaagcaacagtttggttttgatgagtttggaattttctgccacttgtagtgataaatgttcttagcagaagcacgtggcagcattaaacttaaaaattaatatcagtacgtatgttaataattttaactagttttattttagaaggataaggatattctgactagattacagtaacatctacaattgcaatttctatgacagtaaatttagcttctataaaacgtaaagaacctttagtaaaacagcagggaattgagtatcatctgttgaataaataaatttatcattttatcctgccagaagtatgatgggcatcttccaatagaaataaaagctgttcctgagggctttgtcattcccagaggaaatgttctcttcacggtggaaaacacagatccagagtgttactggcttacaaattggattgaggtaaattgtttttttaattcttatttaacattaattgaataaagaccattgaactgagattacagtttagaatttgttactaatannnnnnnnnnnnnnnnnnnnnnnnnnnnnnnnnnnnnnnnnnnnnnnnnnnnnnnnnnnnnnnnnnnngactaaataatctttaaggtttcttctagtagaatagaatgttctgagattttgtttaaatcaaattattgagagtgattgtttttaaaacctagttggctttcatctaattcattgccattttaagtgtgtattattttagagcaaacttagaaaaacagcacatttctagtaacttacgacattcgatgaatgataaatgttcaagttagactaaaggaactttattccaacttctagtaactactttcttcatttttctctcatcagtttaggtcttaggatctaccatctgttacttttcagtttctcatctaaataaaacaagatctgctgttcatattgtttaatttctcaggaagggtacattttgggctttgggtttatactgcgagccttttttttgtttttcttgtatgtatacctaagtagtcatatgttttcacatggtcagagttttgataataatactctacctagcttctgaacagtttaataatagatttaatccgtgagaggaaataccctcgaaagttactatagaaataacaccttactatctggtggcatttacttagttcttagaactgactaattagtttatcggttaaagtaatttgctattatattgtaaaatagtacatttgaggctcacttataaaaattggaaaacatcgaaatataagaggtccaagagggtgtttgaaacacattttgctaagttgacaggaaattaatagactttttatgggccattaactaataatacactcaaaaaaaaggtacagttaaataaaggttttaaatagtctataccgtatactaaaactaaattaatatttaggactgaaataacatattgattaagtaccagctatgtacccaaaaaatgctgggcacagaagttagagtaagatgttttacttaaagggcctttgagtgagagttggcaattcattctgaactaaccactaatatcattaagaattagtgctgagttggtagcaggaaataggtaattctgtctaaaggaatcatgaaatggaaaataaataagcttttaataaggagaaggaagagctgaagaaatggcacagtgttcttagaatgacagatagtcctatggggactgcagcataaaagtgaaaaatgtataagataaacctttagatggtaagcaaggcaagattctcaaattctgtatgaatcagctccacctccgccccatggacagtagatgaccgttaatggcttttaaggaaagatgcaacctggaaaaaaaaagaaaaaaacttgttttagaatggtaaccactggcaatatgaagaataattagactaaagaagagaggtaggataatcatgggcattggcagtggaattgaaagagtaatttcagaagcagaatggtcagatgttggaggtgattggttatagagtttaagaattgnnnnnnnnnnnnnnnnnnnnnnnnnnnnnnnnnnnnnnnnnnnnnnnnnnnnnnnnnnnnnnnnncctgattctgtggttgactggatggtcgtctgctgctcttgcttagacttaggcatctgcatttagctgagggttcagccagggctggacatcctttaatggcctcattcccatgtctggggcctcaggtcagatagctgggactaccgggtctcactccagaagaggcttcttcagagcatggtagtcttggggttctaagagaatgagagtagaagctgcaaaacctcttgaaactggggcttgggagtcacacatgactttctccacattctgttcgtcaaaagcgaatcataaggacagcacagactcaagggataagaaaggagattccatctcttgatgagaagagctgcaaaggccatatttaatcagtcacaggagtctaatgctacaaagtagttttttaaaaagatgactagattggcaagttcaaggttaatctttttatttgttttatttatatatcacttagctggtattcagtaaaagcttgctttgtaaaatttagttaatatctttttggttcagcacagacattgcatcatcttagcagctctttttcaaacagatttgaagctgcttcaaataacaatctggtttataaaatgaaaatagaaaattatgatcttagaatgaagaagtgaatttctaagccatgataattattacggttgctgtgattagacagacttttctgtggagcttcctgacaaccaagaaaaaaggggaaatcaaggaactgttcttatcagaaagtaggaacccagcaattctttcattttctcattgggaacttaatagtcactgaattacaaagtagacagtgaccttgattatacaacatatgcggaagtgtttcctgtaacttacgtgagtattttatcaaatacttatatatttgataaaagctaagtacataaagcataactcagtagatagaattctctagtagtaagctaaagtgcttcaagtattagttgtcatattaatccaagagaaaattagatctgagactacctcgaggagtaaacgaacaacttctttaaaccaatactagtcaaaatgcagtccacggaccaatgctggttcatgccctatttgatccaagtccacattaagtacagaaatgaagagtaagcatttagaaacttggggcaatttgacattgcctcaacatccaagtttcagtgtcctttataaactattgatccatgacagatcatgaaactttctaaaaattgatccttttatcacatagtctttcaaaatattatttgcttctttgaagctttggatagaaacttgataatgtgaagttctctgctatgtggacctggtgtgcttatcttctttgttgctgatttgagagctgagctatgtactatatctggaatgcacacagcaggcatcctgctgtgcagttctgtgtctagttaatagtatggaagttcacattatcaagtttctatccaaagcttcaaagaagcaaataatattttgaaagactatgtgataaaaggatcaatttttagaaagtttcatgatctgtcatggatcaatagtttataaaggacactgaaacttggatgttgaggcaatgtcaaattgcccca

SEQ ID NO: 2106 - protein, 8 aa, Homo sapien
  Unsure 607-674, 2124-2188: Unknown amino acid
MLRQCQIA

SEQ ID NO: 2107 - DNA, 1187 bp, Homo sapien
aaccaaaaaatagcatctgtagcccctgtgtgcttactttaagtatatgttactgaaaaatgcggagtgagcacttacaactcattctcctgggaagcacagtgatactataccccaaatgcttttctttatcattttaatttttatcttctttacttacatttccaacatcagttaagagggtcttgtagttttctaactgaaaggagattgtaaaatctccttgctcaaaactcagatgcagaatattatttttactacaataaatacatctacaacaatggtattatatctggtttatttcaaagtcaagttctaatataggtaaacaaatatactaataaagagataatgcttttctcatgaaatgtataatctagtaggaataaagataaacaatttttttaaaaattctatttcattaagcaaaaatgcaactcagaagaataatgtatattagcagtcatttactatttttcaattaaattccgatatatatgtaaagtaaattattactaatatcaaacatagtttaaagaattagtgactatgtgcacttggatctccatatgtaatgtactatcagcatcttcacaaacacagtaaattttactacgcaagtaaaacttattttactaaacgatgattactccttctatattcatattcctaaacacatacagtttcttaatgtaattaagtttttaactaaaaaaagggaaatgcattattgaggcgataggattactgggtggctataaacacatctgctgcacagctgacatttatcttctacaatgagcaatgacaattttattttttaataatcagtatggactaatcctgatgatttttttttaacattttcaaatagggctgcatatggcttaaaattaatatatacatgtgtacctatataatattcttatttattaatggacttcctacatagctcatattgacgttagatttaaatgaaattccagaagggttttctataggtaagtcatacattggatttccatattacctatgattattgaagtatttatttctgtttttaagacttcagagcaattttgctggtcatttgttttctgtgtttttattttgaaattgttctttgaggcattgtccttatttacatttttaaggtatgttaataaaataatatttttaatgaaaaa

SEQ ID NO: 2108 - protein, 50 aa, Homo sapien [sequence omitted]

SEQ ID NO: 2109 - DNA, 967 bp, Homo sapien
gtgaaggggtagagcatcagcctccgcatagtcatgcctcaagaaatgtttgttgattgaaaataaaagtccccccagccctccatagtcaggcttgaggacatttcaggagctgatgttggaatctggaggctggaatccgggctgtgctgttggccagagctgcctggggtccctcatggagggcgttgggagctgggtgcctgctgagagaagacttgctagcaacccagcccccaccccacaaaatgctagtgcccccctctttacagggacacttcagatgctccctccccaccctactgtcctggggcttccgcccagtgggctggtgttttctggaggagttaccttctcactcctgggcactgcctagagtcagggggcagctgtgggccttccttggttcttctgcggcggtcttggagggagtcagcgttggccctgcctttggatcggagcagaaggaagttgtcccacatcttcctcctcccagggacccctgaggcataccctctggccagggcccccacccaggccctgggcatctgcctcgggggctgtgcccatctcccttctaccacccagctggtgtctgtgccaagaaaggggaagtaccatctttgctgaattcttgacttttgtgctgttaaaaaatcagctttaacagagttttgctcatttaatttcatttccattgcacagctaagcgcctttgttaaattttgtatattgatactttttgttgtcagcagtttattcttttttttttggatataaatccattagggtgagagaagattaaaaagatacattacaattaaaatgttaatgaaatccgtatcacacaacttttgaaaccctttaggcattaatcttgcctgtgtcatgtccattaactttggctattcttattccacactgacccctgctgagagatttgtgctataattggatttttttttaa

SEQ ID NO: 2110 - protein, 17 aa, Homo sapien
EGVEHQPPHSHASRNVC

SEQ ID NO: 2111 - DNA, 990 bp, Homo sapien
cacacatgagttttcaaacattaaaactattacttaatgcccttgtgacaaattagtgttttatgaaaattggtattttaccccacagtaaaatagtagtaaggaaagtgtattgttaccttttagtaacttagtgagacacttaagtttctgtcttgcataaaatactcttttaagataattgttggatttgggatttgcagatggtactataaagttagcattcttctttcttggcaattagctaaaaacaacaaagagagggaaaaactgacacacaaacccagcattccactaaactagaagacagttaaaaaccccaagccacaaaataggtggaaatgttgccaggagcagtggccatcaggctggctgcatgtgggaagaagtaggtaggatgccgtggctgtggagctcagagacaacaagaaacacccatgaaactgcaaggcccccctgaggtataaaacctaaaccccttgtttacaaaagtgaagtgggtttcttcagctcaaggcaggagctttcctgcacctggtttaattctaagaagtcggggaaatgaagccaaacaaggagtcacataaacaagccatttttgcaggaagtaatatgtgtctatctctatagcagttggggaggagatgactgcattgtgaaaaacctccagactgcctgtctgcattggctgttgagaagtaaaatgctaaactgtctcttaggtaaatctctgaatcacgaaaaagttgtcagtccagaactggaggcactctggccttctgcataaacctcctacaaatatcaggttctggacaaccagcacttcttcagagatgaataatcaaaaggaattcattaagcttgactgccacaaatgtttggaaataaaaaaggaagaaagaaacagaaaaacaaaggacagatgaaaaatagaagtaaagtactggtatggagcatcgacatgttcggggtcctctagagtcgcccgag

SEQ ID NO: 2112 - protein, 13 aa, Homo sapien
MEHRHVRGPLESP

SEQ ID NO: 2113 - DNA, 560 bp, Homo sapien
tcctcagtagctatataataattttagctagcttgccatctggggacccttcctaagtggtagataagaaacttaaaataggattgtactttaccatcatatttccccacccagcactgttactggcataaatatgtgggcaagtgactggtgagagagtgatgcctttggcagggtatctgatggtgagatcgactgagaactgagtggaagagaaggcgaagtatcagattgccaaaagggcttttattcttagctcagcccttcacgtatcctgcaaagagctgctcagcaaaaggtgcttattgaattacacctcataacaggcagaatttgaatgctgttcatcacaggagctatggagtgcatagttttatagagagtatctccccgcaggcaagatacatagaacaggtgcagaattacagcatatactcatttcgcctcttgttaaataaaagcaaagacagtctcatgcgatcctgtgtgctgagtagaatatccattatagagcattttcttttatttttgttaatatttttacttgtagatttcccatt

SEQ ID NO: 2114 - protein, 27 aa, Homo sapien
MRSCVLSRISIIEHFLLFLLIFLLVDF

SEQ ID NO: 2115 - DNA, 579 bp, Homo sapien
  Unsure 13: Unknown base
ctcaaataacccntttaaaattttgttgtgagtcagatgtttctttaacgcatggttgcaaaacgtgctgttagtaaggaacatgactgagatctacattcaggtcctagtgcagtttcttttgctgtcaccagggccatcttgctggcttgccacaggttatgtgataatgactgggcatcattcatgggaaactgcactgcgtaagcaggcctggctaggcccacagtaggccccgggcacattttcagctgcgaagcggaggactagcaaccggtgaggtagaaggagaaccaagagatggtgggagaatgggaactgagctgagagagcttccggaaggttgcggtggcctagggcgatccacgtcattgagaaacggcgttaggctgatttcacggggcagatgacatggaagtgctgctgaggaagacgctgagctccgaggtgaaaagggatgaggacgcctaagaagacacgagcgcaatacctaatacaatttcctgaaattgtttcatgtcacacgttaaaataatatgaaacacgttaaataataaaatggtatgaaggttttgtctg

SEQ ID NO: 2116 - protein, 49 aa, Homo sapien
  Unsure 13: Unknown amino acid
MTEIYIQVLVQFLLLSPGPSCWLATGYVIMTGHHSWETALRKQAWLGPQ

SEQ ID NO: 2117 - DNA, 478 bp, Homo sapien
ttgtgggagactttaatacatcttgaaaattaaactggtttatcagttaaataggaataatgaattttaactgtaaaataaataagacttgattcattttcatagaaatgtatgtatttggccatcttttataataatggaaaaattaataaaaagagctatcattaaagcaaggcaaacaacaataacaaaaagagaaatggtgtcccagatccctggtttctaaataccactctccactaaaaggaatttggagaaatggctgattctggggttgtgataggtaagacacagaatgagtatggtatcagaaacctagaaaatgttcaaaaaattaagagtgcccacttcaaaagcacctgtactaaaattggaacaatagagagatgattagcatggatgacacacgaattagtaaagcatttcatattcttgtaaactgtgtatgttttatcacagtaaaaaaaaaaaaaaaggg

SEQ ID NO: 2118 - protein, 30 aa, Homo sapien
MISMDDTRISKAFHILVNCVCFITVKKKKK

SEQ ID NO: 2119 - DNA, 1254 bp, Homo sapien
  Unsure 307: Unknown base
caagggaagtatcaggacccagaaagaggtgattgcataaaagtcacatttcacatctctcttgacaactcttgcttcagggacaaatttgcagtggtgatgaattcctttcattcttagctttcctcctattacttccctgatttattttacttacaaatgacacgtctaaatggcagagacctgaagttctcttgatggggtgctgagatgttcagaagggaggtatcctgtttaaccaacagatcatttatagataaagagaggctctaacttagcatacagttcatctatttccttcccccangaaagaagggatatttacatctcctctattccttcttccagggcaagaatcttctgttccatatgcaacatcttctggcagccttgtcctttttctgtccttgacgactacaataacaaacagctgttgccgaggcattgctgttgacgtgttacctttgaaacctccctcctgttatggaataagcctcttccagatcatggatcattatcatctagtctgacaagcagccttgttgccacggagacccaaagggatcaggcgtggcatttgcctgcatcatcaccccctccaggggaactataaggactcttctgtgcgtcatgcgtggctgtcctgggactggctgccaccagacttttcctgcgggtaaaacctaaacaaatgatcagctgcagataatatcaagacctctgtttgatatgttaatagtgacagccagatttccacaattaacaacgaggtgggaagaaaacactgtagtcaccagacttgggaggagagggtttgtattcacataaacacaacctcacgtcactgcttgccaccacaaagggctctgttcactgttttgttctcaaagatcatccttgcgctcatcctctgatcttgaatttctacataactttctcagtttatatgccctgtggcaagtgcagcaagcactgtttcctgtttctaaacttgtagaaaatcatccatacatcttacagttgtcagttttaaccagataacagtggcactttgttgctgcttttttatctttagcttaggttaacaggaccctggaagtaaagttgttgatttattcaatagagtattctcaattaatttggctagatttctacatgattcaaaatctaaaaaagtagaaatgcatgcttacatgtctaaggcctgaaaaattggtagtgacatcccaaaataaatgaaggttttaaaacaat

SEQ ID NO: 2120 - protein, 39 aa, Homo sapien
  Unsure 307: Unknown amino acid
QGKYQDPERGDCIKVTFHISLDNSCFRDKFAVVMNSFHS

SEQ ID NO: 2121 - DNA, 953 bp, Homo sapien
atgaataacttgctggatggaggtcaggtagcacctgtataaataatgaatttgcccttccaaaatatataatgtaaaattaatcaatatatatagcttgccattttgtttttattcagttcaacttccttgccgctctgtagttttcagaggagtaaagtaaaaattatgagttctgagaaagcaaatttgcttgccataactccatttgagggtgactgcgattttgttagcataagattgaagctaatctcctaaagagtatatctgattctgtgtcttaatcatttttcacaagaaaaaaaaatcgggacatataggtatatgtagagtaacataaagccaccaattgtagaactgatgtgatgtgaattgtactgagggttggcatgaatgcttttctttttcacgtgtaacattaggttcagacatatatgtgtgcagtgcattgctgtaatgtgtgcagatggtaagaacacacatgtctcaataccatgctttatcgctcaatagcctgacagatgtatatgggtgaattcattcattgccctctctgttgattagtagcactttgaaaatgatgtcgtaatttggcaaactaaatcctggtcggggagcagtactgaaagtattgaagaaatgacacgattatagtttgatccttgtacttagaaccttcatcaaatataaggttttaggtcttctgtaatgttaaaaaaaggaaaggaaaaagagctagttttacatatgatgcagaatttgaaaaatttgtctttttattggcaaatgctgatttaaaagtccctgaatcatttcagaatctgtagagaatgagatgtggtattatatgtgatatcacattaaaaagtaaaagttcagtctgtggacaaagtctattaaaatgtttttaatatagtagaggacctcgtaacatatgccactgttagtaaaaa

SEQ ID NO: 2122 - protein, 13 aa, Homo sapien
MNNLLDGGQVAPV

SEQ ID NO: 2123 - DNA, 4359 bp, Homo sapien
  Unsure 3716-3794: Unknown base
ggtactgcagtgagaggcatgcttccttagaccaggcaacatttcatttgttgcatttccagtttccaataccaactcacctacaaagattttaccaaaaaccttaggaccaataaatgtgaatgttggaccccaaatgattataagcacaccacagagactaaccagttcaggaagtgttctgattgggagtccatatacccctgcaccagcaatggttactcagacacacatagcagaagctactggctgggtccctggtgatagaaaacgggctagaaaatttatagactctgatttttcagaaagtaaacgaagcaaaaaaggagataaaaatgggaaaggcttgagacacttttcaatgaaagtgtgtgagaaagttcaacgaaaaggtacaacatcgtacaatgaagtcgctgatgagctggtgtcagagttcaccaattcaaataaccatttggctgctgattcgcaggcttatgatcagaagaacattaggcgaagagtttatgatgctttaaatgtgctaatggcaatgaacataatttcaaaggaaaaaaaagaaatcaagtggattggcctgcctaccaattctgctcaggaatgtcagaatctggagatagagaagcagaggcggatagaacggataaagcagaagcgggcccagctgcaagaacttctcctacagcaaatcgctttcaaaaacctggtacagagaaatcgacaaaatgagcagcaaaaccagggcccgccggctctgaactctaccattcagctgccattcataatcatcaatacaagcagaaaaacagtcatagattgcagcatctccagtgacaagtttgagtatcttttcaattttgacaacacctttgagatccatgatgacatagaagtactaaagcggatgggaatgtcgtttggcctggagtcaggcaaatgctctctggaggatctgaaacttgcgaaatccctggtgccaaaggctttagaaggttatatcacagatatctccacaggaccttcttggttaaatcagggactacttctgaactctacccaatcagtttcaaatttagacctgaccactggtgccaccttaccccagtcaagtgtaaaccaagggttatgcttggatgcagaagtggccttagcaactgggcagttcctggccccaaacagtcaccagtccagcagtgcggcctctcactgctccgagtcccgaggcgagaccccctgttcgttcaatgatgaagatgaggaagatgatgaggaggattcctcctccccagaataaagacaagagaaagcctacgtttcaatatgtgatgctcatgtgtgtttgtagtgtgagctcttgtttttgaaatgattgcttcagtctttgcctttgtttgcactgtgtgttcagtgaaaactagagaaacacaataagcaaatcacatgaaggctgagatgattgagatgaaagttaacatagtgtgaatgaaagtctggccaacagagcagtagatgatataacaaagaaagcatgctttctgaggagatagtggggataatccctgaagagttggcagtgtgagtgcaactcatttatcttctgtgaggtgggatttttgtgttcctcacacccatgtaattattcttagaattgagattgctacacggagcagtccttgacgatcgtgtttctgacgtttctcttccttgcctggactgcctttgacaaggcagaaatgaacatgaaaagtccccaggagaggggagctgtgtagtgagggatactgagggcagtcctgtggctgaggggcacagattgaactgctgaactagttggaggtctagatgaggtgctttacgcatcagctgccttagacagcttctagaaaggagcgagcgctacttcttaagtacttaagtgacatttagataatttatagtaaaactgaaattattattagccaatgcattggtgcatagaatttactagggctacttctggaagccaaaatagaatagcatttccatgtgcattaaatactttgccagcactgcctttgccagcatcctaaatctggagttttacaaagaaggaaactgtatctttaggttaatcaaagctatgcatttcatatagctttttcatttaaaacaagacaaagaaacaaattcctatgaccaaattgcttgcctacagttccctgcagtaattgtatgatctcacccagtgtgcaatttgtgaaaatgaaccaaatgtcattacttttgtcttaaagaaaagtctatttcaagaatatgaacagcagtgtttccttgtacatgtcaccttttttcacattttcattaatcagaatgaccttattgagcctactcctggggtcaattgcatttcaaactaatccaatatttagtgtttcacagaaacactagaaaacgttgaacactcctactgcctggatatatggtagtgcagttatgttgtttatggctcaagatgtcattagaaatactgcagtggtgtattcacagctgctccttctctgaatgaaagagtgtagggacacctgccaccatggccagaccctgactgaatttcacattaaggctttggaaaggagcaaataataatgggagaattaactccaaaactttgacctgaatcatgtggatttgtcccaagattatgctagatgcaccaagcatggcccaaattggttcttttttaaatcccatgggggaagtgcaggctccttcctgtggtgcctctttatagcctcaccaccatgctaacactgagcatggtgaggaggaggaagctttggctagctaaacatgtttaataaggccataaaaactgagaaagaaaaacattcaactttagctgaagctcctttgatacaaaagtttcattctgtcagaaataagccatagtacagactcagagatagaggcagtttctagagaactcggtcttatcgtgggttctggagcacacctctcagaccagtcaggaacactggggaggtgacagcaggtccccaggggcctgcagggaatctttcagctgcacggattgggatttccctccaaaccaaactgtcctttaaggggcagcctcctcttttactaactccaccctttctcatctctgggacccagcagggacctggagaggccaacagccactgctacctttgtagtcttcaaaatattgaactgcaggtcccaagatgcatttcaggatttaagacaggtgcactaatgataaccattccttcaccaagtagcaacattcttgccagagttcttgggaaacctgtttttttctctactctccatctctgctgctctcatgctttaaattgataaaatatgggctcaaaaaaagaaagccgccaaagactcttatccttattggtgccccatcattggccaccccagccataggtgtgtgctgttggtgggaaatggtctccttcctcagcgttgtgtttgggttactggtgaggccagctcacagagtgacatcatggtcaccagtacatgtcgctggagtaaaatcttgcctttagaaactaggttgagctgttcagaaaggtcaattctcttctgtattccccctcaacatttatctgggtctaaagctcagcactgagtcacaatttcacacaagatcaaagtgaggcagtgttaggaaaccatgggctgggtgcggnnnnnnnnnnnnnnnnnnnnnnnnnnnnnnnnnnnnnnnnnnnnnnnnnnnnnnnnnnnnnnnnnnnnnnnnnnnnnnncctttcaagggccctttaatatctatcaagctccctcccctaacaaaatgggctgtccctgcccaacaagtctgaaatagaccttaaaactgtgctgccttagtggtaagtaaggggtgggggttggacagtgaatcttaagatttcatccttcattcagtaagcatttgagtacctactgtgagcaggcattggggcggagcagcgagagccctgccgatgttgggttctcctcctattggggaaacttgatcacagatggaacacgtgcagattgattgatgagtgctgtggagaaagcagcagcgtagcgggaccgtttgggaaaggctactttggctgggggtggctgggaaaggcccctctgggaaagagacagttttactgagtcagatggtggaaagacagatgtctctatactttcttaacaagccactctgtcccataacatgcacttggaatctctcctaagttccagaggccccacgtgttccagtttcaagccttcatttgggagtcgtgttggggaacttttaagacttcaaagcaaagttagctaccagca

SEQ ID NO: 2124 - protein, 431 aa, Homo sapien
  Unsure 3716-3794: Unknown amino acid
GTAVRGMLPRPGNISFVAFPVSNTNSPTKILPKTLGPINVNVGPQMIISTPQRLTSSGSVLIGSPYTPAPAMVTQTHIAEATGWVPGDRKRARKFIDSDFSESKRSKKGDKNGKGLRHFSMKVCEKVQRKGTTSYNEVADELVSEFTNSNNHLAADSQAYDQKNIRRRVYDALNVLMAMNIISKEKKEIKWIGLPTNSAQECQNLEIEKQRRIERIKQKRAQLQELLLQQIAFKNLVQRNRQNEQQNQGPPALNSTIQLPFIIINTSRKTVIDCSISSDKFEYLFNFDNTFEIHDDIEVLKRMGMSFGLESGKCSLEDLKLAKSLVPKALEGYITDISTGPSWLNQGLLLNSTQSVSNLDLTTGATLPQSSVNQGLCLDAEVALATGQFLAPNSHQSSSAASHCSESRGETPCSFNDEDEEDDEEDSSSPE

SEQ ID NO: 2125 - DNA, 1824 bp, Homo sapien
  Unsure 1168-1248: Unknown base
gtgggaggcaccctgagcccgctcgccctggccaataaggcggagagtgtggtgtccgtcaccatgcccggcatatatgaagttttaaaaaatcagaatacagaacaaaatttattgggagatgagcttctttctttctctcttcaacaccatcgccacatcacctccacatatacacacactgaaaagatactgaaaagacataataaccatgggaaatggagattactggattgttaaatgttctttttgcctgtctttattctctaactttgctataatgaacagaaattattttttgataagcaaaaaatattttaactttaaacatgtaaagtaacttagtagttgtcttttcaaaatatgtaagaatcattagttcactagttggttaaatatgtttttaatcccaacatcttgataattgtcgcaaaattgagggaacattttttgaactctaaaatgctatagaattgacagatcatttttcagttcataagttattacttataatcagtttttttattgttactatggcaatattttatacacaagaatggctgaggttaggaatttgtgccctgaaaattgtatcaacatatcaaatatgaagtaaataacaatttcttgctttaaatataacaaagatgtgggaagaagtggtaggcaagagtctctgtgttaccatgggaacgattaagttttccaaggtgcaaaccagcctcattccagcttcagggtcaatgacttactagctcagagggaaatgtataaatatttaagtacatacctactatctgtacagagtgactctcattacccagagaactgctgtaaaatattatttattcacagattacacaaaaccaatctaaattagtacttttatacattctatttggggagtacttaaggtgtatgagcaaacaaattgttatccaggtcactccagaactgttgtatacagattaagaattgatgttggatactaattaaaatcattaaagcaaaatcaaaaaacactttggctagcatttcaattattttttaaacaggatttcttaaaacaatccccaaagtagtcttgtaatttgttcattttaaggatctatgttactctgaggccaatcaagggggctaacagtctagttggggagccaagatagcnnnnnnnnnnnnnnnnnnnnnnnnnnnnnnnnnnnnnnnnnnnnnnnnnnnnnnnnnnnnnnnnnnnnnnnnnnnnnnnnntgaagaatacctgaaacatggcacctgacctcaaaaagcttaaaattaggagacatagacatgtaagtaaataactgctataggcaaatctcagcaactgccacacctgcttgctcctttagcagaacttctctgattggccatattctgcacatagtgaccaactcacctcttttccctatctgctttccttgctatagctgagaaaaaagctgtggcccaaaagtttctcccctgagagggacaggatcagattgtcttttcaagagttcccatgtgcaatacagagctgaagttgaagctgaaaggattcatagagaaaggccagtataaatcttcagcataccaaagttatgagaaaggagaaagcttgcaatgcatgtatagaggaggtgctgaggagttggtggtagcagcagacaagggaggagaaatggatagaatcatggttattgtcaaggtggaggatccgtgaactgcaactgaagagggctagtgacatgacccagttcttagggctgtctctattcctgaatatttacttaatataaggcaattcttatatagcattagggt

SEQ ID NO: 2126 - protein, 79 aa, Homo sapien
  Unsure 1168-1248: Unknown amino acid
VGGTLSPLALANKAESVVSVTMPGIYEVLKNQNTEQNLLGDELLSFSLQHHRHITSTYTHTEKILKRHNNHGKWRLLDC

SEQ ID NO: 2127 - DNA, 1116 bp, Homo sapien
  Unsure 456-478: Unknown base
aaaaaaaaaaagaataccatggtagcacagtcataccctttaatggctcacattgttcaaacagcatgatattaacttttttttaaaatcaaagcacaaatgcttcatgcatataacttaaagagttttagatattttaagttagaaatgccaaaaatataaaaaccatgaagaaaaatttctatagaagttaggaaattaaaaatcgatcataagggaagcatctcaggtttttattgcagtatttggagatgaaaaatgactttctattgacacgatttgttatttcagcaaaatagaagtctgtcagtctaatgttggatgatctgatagtctttgcaagaaataattgcagagagtttctgcaatcactgggaaatagaaatctataaaaacatctgaaaaagtgtgagactgggccactgcctagggggatagccctgttatttctatggnnnnnnnnnnnnnnnnnnnnnnnctctgaaaaggaaattcttaattcctgtatttacagtgcctttttcagtaggtttttcctgcaaagggtgcttgtcagttactttgctttaatggataaaatctcaatttccaggccaaatgtaactttttttggtcttacatcttgatttacttgtacttaagaggttttttctccctgtaatatttttaaagcttttaaaattaacttcagcttaaagacaatataagtatgaatttctgtttccagccttgtagttctgactgtatttgtcaatggtttctatattaacgatagcattgttccattgtgtaatcctaaagttaaaaattctaagaatgagaaaaacagctatgaataaattataagtgaaagatagaaaaaacacatatttctatactaaatattgagagctttgtatttttcaagttggaatcaatatattgagaactgactttaaattttaaaactcttatgctgagaaaccctgacaggtaggtaaacccgtttgtctacataagatgttagcagtgtagtattgtgcacatcaagcatgttacaaaaactctaagttattctctgaagatacataagttttactagagatactctggatttattagtcctgcaaagccatt

SEQ ID NO: 2128 - protein, 27 aa, Homo sapien
  Unsure 456-478: Unknown amino acid
KKKEYHGSTVIPFNGSHCSNSMILTFF

SEQ ID NO: 2129 - DNA, 400 bp, Homo sapien
tgtttcaaatctcccatatactacatcagtggtcttcaaactcttctgttcctagacccaaataattgttttttaaattatgtaactccctgcacatctttaaatagacatctataatttttcatcataaatttgttccttatttcttgttaacagcagatagaaacagtattttataagatgaaatattgtgaggattgactgcaattggagtatttcatggtatggcttgataaaataagttttaactaccttatccataatacactctgatcctcaaataagtaaaattttaatccatgtgttttgaaaacccatggattaaacacacagattaggaaggagtacctatggaatgtgaagacctggaaacggattgcctaagagttatccaagcaaa

SEQ ID NO: 2130 - protein, 38 aa, Homo sapien
CFKSPIYYISGLQTLLFLDPNNCFLNYVTPCTSLNRHL

SEQ ID NO: 2131 - DNA, 1237 bp, Homo sapien
gggtctggttgttatttagttatcctgttaatatccttctacctatctgtgcttgctgtttgaacgggactggggttcaactttggatctccaacatggaacaataaagtctacatcgttcagtgaactttgggcataattactgtgtctaggacaccactacaatttcttttcactgttgtcttcctgcccatccttgaactcaccataatttgaaaaggcagtagatcatagaaaactaccaaaagaccaaccaagagctaaatagtttcttcatagcttctctcattttgcttttgctcaatttcaaattcttgggagtttccatagctaagcactgaaatgtgggcctattcccagtcaggaaccagataatcctttttgttggtatatatgttatgatgtagaaaatgaggagtcacttaaaaaaaattcaatggagaattccatttatttgtaggatttctttttctttgaggattcagagttggaaatgaagtgcctttggccttagagaataagatacaggcaaccacaacagcctggaattatcctcctttcctaaaataattctgctgtcccgagtgacttacagccctgtggacccaacccagggtagggcggagacaggaggcagggtagtgagatgtgctttgaatctatctatgtccaggagtaccccttgccctaggagatttggggaacaaagtaagaggatgtcaactctccatctcctggcaaagagccacttgcttgtgcagtttaatttgttgtttgtttgtttgcctttatagggactgcacattatctaccttgaagtgctttttctggcagcatagttactgttaaaaaggagaagggaaattgagatgagaggggcggggcagaaacatttttaaatattgctttatgggtgagaaaggaagaaaatatttgcagacaaaaaaaaaatctgccaggaaataatttcttcttttataaaactacgaggttagtctaaatatgatctttgcaatctcttttagttcaaaactgattatttgaagattagtatgtaatcttcctcgttcattgaatggcgttcttcttttatgtgtgttgcaaaacaacctttttagaaaatatctgtgaagcttatcttctgattaatagctatgattgttctttgtaagacaccagcttgaatgtcctgaaaccagaagccctagtccactggatatactcagagtatcttacc

SEQ ID NO: 2132 - protein, 34 aa, Homo sapien [sequence omitted]

SEQ ID NO: 2133 - DNA, 677 bp, Homo sapien
gactgggtggatgaggctcaccccggcggggagaagggacgaggaggggcggacagcggaaggtccgggagtgtccgccataaagtcgtttgagttttaacttctagtcatggcgaatgatcgcaggagagcacagactggaccctgctacgatctctcttggagtggatcagactgatgatcaccaacaaccaactcattcccggataaggaagaagagagtgtcacctacttcagtgtggtttcaaccctacttctgcatcttaaagacactgtgtacaacgttggacactgtgcaggatgatgccacttcatcttggatgctaatctgccatgttgacttctgattaaccccaggcccaggaatgcctcaagatttctactttacttactgttgcttgtgtaagccaagacaaccttgatgttatcataaacatgtacttacctaagtcctgtcctttggcaaattatgggctatgagacacagcattcttgcctttccctgaggggtcaatttcagcgatcctacacattccttctgaagcacttatgctctttctatatggtatgtaagctctcggtctggggagtaacagtgcagagatctacctgtcttgttgccacatgtttctaaactttccaataaatcaccttctactgacaaaaaaaaaaaaaaa

SEQ ID NO: 2134 - protein, 76 aa, Homo sapien
MIAGEHRLDPATISLGVDQTDDHQQPTHSRIRKKRVSPTSVWFQPYFCILKTLCTTLDTVQDDATSSWMLICHVDF

SEQ ID NO: 2135 - DNA, 1272 bp, Homo sapien
  Unsure 596-763, 1066-1092: Unknown base
tggctgggtttttttctacattgcagtgttgctttagtgaatgacagattgcccttcttgcctctccaaggctgagccactgggcacgggaagaatgacagtcctgggggttctgtacatgcatactccaaaaaaatatgcatccagaacagctgtaggccctcaaagtgggtagaattgaattcttctaggaattaagcaagagttggcccaaatcagaggggacgtgtgtctcacttctgcttggaagccctttgctctgacttctagggacccctgtaacccgtaagtaggttatgcaacggtttttacatgagagggccatgagtgttctcctggcgggatggagaagcattgttctggtctttgagcaaatttttgagcaattacagttctgggccacagttccctctcccaatttctaaaagtggcctgggtaacctcatcaccctctgttgtcctggaagggtgagatctcttgaaggttatgccaaatctcattacagcaagaagaaatgactcacttgctaagttttcgtgttcattgaaacatcactatttcaggggcctcaatgtttcaaccctgaccgttggcnnnnnnnnnnnnnnnnnnnnnnnnnnnnnnnnnnnnnnnnnnnnnnnnnnnnnnnnnnnnnnnnnnnnnnnnnnnnnnnnnnnnnnnnnnnnnnnnnnnnnnnnnnnnnnnnnnnnnnnnnnnnnnnnnnnnnnnnnnnnnnnnnnnnnnnnnnnnnnnnnnnnnnnntcagatgacagaggggagcggggacaagttttaagtctaagcctcctgggtggggagttctgctgtttcaacatatgctccagtcatggcagactttggccagacagcgccctttttcagagtgaactgagtgtagcacaagttatctgccagtgctagttagcaaacagaatggagccaaaaaagaattgatttgggaaggcccaaggaatttgaaaccgttgagatgaacactttccgtttttgctacactgatttatgttgtgctgggaattgtacaagcctttgaccagaccttagggnnnnnnnnnnnnnnnnnnnnnnnnnnnttcccttgctgctgcttttacttttttgaagggcagaagggaagggcagatatataataagaacacacctgttcctatatatcacttgctcgttcgggttttctgaatagctgaaatatcaacatgtttatctcttcccttgccttagtatatcctagagcagtgttttccctggcttta

SEQ ID NO: 2136 - protein, 144 aa, Homo sapien
  unsure 37-92: unknown amino acid
  Unsure 596-763, 1066-1092: Unknown amino acid
MPNLITARRNDSLAKFSCSLKHHYFRGLNVSTLTVGXXXXXXXXXXXXXXXXXXXXXXXXXXXXXXXXXXXXXXXXXXXXXXXXXXXXXXXXSDDRGERGQVLSLSLLGGEFCCFNICSSHGRLWPDSALFQSELSVAQVICQC

SEQ ID NO: 2137 - DNA, 6248 bp, Homo sapien
ctgacctcttcctacagcctgtggtggatgctgaggagttccctgaagcaatattcctttgaggcgttaagagaaaaaagcaactacagtgacatccctgatgtcaagaatgactttgccttcatccttcatctggctgatcagtatgatcctctttattccaaacgcttctccatattcctatcagaggtcagtgagaacaaactgaaacagatcaacctcaataatgaatggacagttgagaaactgaaaagtaagcttgtgaaaaatgcccaggacaagatagaactgcatctttttatgctcaacggtcttccagacaatgtctttgagttaactgaaatggaagtgctaagcctggagcttatcccagaggtgaagctgccctctgcagtctcacagctggtcaacctcaaggagcttcgtgtgtaccattcatctctggtcgtagaccatcctgcactggcctttctagaggagaatttaaaaatcctccgcctgaaatttactgaaatgggaaaaatcccacgctgggtatttcacctcaagaatctcaaggaactttatctttcgggctgtgttctccctgaacagttgagtactatgcagttggagggctttcaggacttaaaaaatctaaggaccctgtacttgaagagcagcctctcccggatcccacaagttgttacagacctcctgccttcattgcagaaactgtcccttgataatgagggaagcaaactggttgtgttgaacaacttgaaaaagatggtcaatctgaaaagcctagaactgatcagctgtgacctggaacgcatcccacattccattttcagcctgaataatttgcatgagttagacctaagggaaaataaccttaaaactgtggaagagatcattagctttcagcatcttcagaatctttcctgcttaaagttgtggcacaataacattgcttatattcctgcacagattggggcattatctaacctagagcagctctctttggaccataataatattgagaatctgcccttgcagcttttcctatgcactaaactacattatttggatctaagctataaccacttgaccttcattccagaagaaatccagtatctgagtaatttgcagtactttgctgtgaccaacaacaatattgagatgctaccagatgggctgtttcagtgcaaaaagctgcagtgtttacttttggggaaaaatagcttgatgaatttgtcccctcatgtgggtgagctgtcaaaccttactcatctggagctcattggtaattacctggaaacacttcctcctgaactagaaggatgtcagtccctaaaacggaactgtctgattgttgaggagaacttgctcaatactcttcctctccctgtaacagaacgtttacagacgtgcttagacaaatgttgacttaaagaaaagagacccgtgtttcaaaatcatttttaaaagtatgctcggccgggcgtggtggctcatgcctataatcccagcactttgggaggccaagatgggcggattgcttgaggtcaggagttcgagaccagtctggccaacctggtgaaaccccatctctgctaaaactacaaaaaaattagccaggcgtggtggcgtgcgcctgtaatcccagctacttgggaggctgacgcaggggaattgcttgaaccagggaggtggaggttgcagtgagccgagattgtgccactgtacaccagcctgggtgacagagcaagactcttatctcaaaaaaaaaaaaaaaatgctccagggctttaaatgagaagtaaaattttctaagttaataaagatgaagaatgggtgactattatgatgaaccataactaaatgtcttattaaagcaactgagtgtctagccctaaattaaccaggtaaaaactgttaacactaacctgaagttttgtgaataactgttctttaacttattgagatgttgcaagaaatgcacatccagggtggactgggagctatgaaatgactaaattcctccttgcagtgtttaccttcaagattgtataggtattctctcctcttcttcccccagtccccattacttatttgcacacttgttttaactgacttcctgttttgatatttatcaccaagaccataaactcatcaatatgaattttcttgatgtatactcacgactgtctttgatttatgttcctaaatttttttagatagggtatgttgtgcttggcagaattcttttttggcttaatttttacttcctttcccagcttgcttgagtcttccttaacctggttttctcttaacaccaatgatgaaccctgagaaaatgcctgcatttggcctttgcctagaacaggagctgagtatttaagatgtattatcctcgggtcatcctgaaaattaatgtattccctaaaatttcttcttgtctatcatcaaggcctttttttatttgttaagaatttttatattaaatgtaaaacatataaatattttctattgtataatcttggattcaacatctgtgaggatcatttttgtaagatacgtagaatttgtgcatttctttatgaacttactgttagtgttcttggtttcggctgtttatgactcatgtttatgtacattctgctccaaaatgtttttgtactctgcaactaattacttttggataacaaaagccttgtgtttaatgccctaaagtatttgggggtttccttgtgagagggtggccgaatcatctacctctctcttccatagttgctgtgcaatcgtacgggtaaaattcttaattacttacaaaaactgtgatagaggggagaggtacagatttggtttttaaattgattttaaaatactttatagaaatttagtaagagttaaagcaaaagactttttttccctccatctatgtaatctctagctatgattataatgtaaaacagcctctattcagtgtctaaaatgagttctcaaaacccacaaagaaatagatccatttaactgaaattcatctcatgcctttatctaactcttctggaaaatacattttgctcctttttataaagagctttgtgcttggccttttattatgcatatttttaatgaataaaatcaactgactcatttttgggaaatgtacatctttaatatgtttttccctaagggtctaggcattatgatgccacctcttcattttggatataactatgaagaaatctattaactgcacctacacaaaactggaaaacactataggtaaacagtactgtgtatatggaattgtggtgcgtggtatgtgttttctcttgctttgttccagaaagatgaaagtgagtctttaaagcatagcaaatagagcttcccctcacctgccacacactcctgcactaaagttcaaagaaaagaattattcaaatcaaatgaaatttgaataatattagctatcaggaatataggacaccaaacacactgcctcacacattattgtttattctgaacggaaaggaacagtgtaaaaataaactacttaccaaaacttgcctttagtcagaacattcagctctcagggaagcaggtataactgatgaaacttctaggacttcagaaaacagattctaattatatccatgttttttgttgttattttcattttttaaagtgtgagttgatgtttattttagtgtttcacaatagaattatcatgtatactgattccagtgtggcatgtgattaagttttggacatgaatatgccaaaagtgcttaaatgtttttggccacataactagctagaatttcaaaacaaaattcagatttgctaccattcacctgacgaacttctccatggctcgtcactggtttggttcaactgcagaagtcattggctaaattttccttatcacctacgtaaatttctagaagaatttactagcaggattaataatgaatattataaactgctttccacacactagggtataattattggtgcaatctatgttgttcttgatgccatggttttacatcttttaatttaaaccttatacaccagtgtttaggtcgcttttgagacaaggtagccctgatgcaaggaaaaatgaggctactacttcacataaaaaatagggtgttaataccacctttactgtactgttggagcagatctttattttacaagtgttcatattcacataagagaattttaaatgaagaaaattaagtttgttaaattataattatgagactttcgttggcatttgatttcaagaatacatatgcattttccaaaaaataaatgtggaggttattcagaacaaaattcatagcttacggtagtaatggcatggattaattttatttgcatgcacacacagacacacatacttcatatatgcaaattatagcattagtttttgatatatctagtggtttttttttcaaaattgcaggaggttgtagattaaattaagtatgatagcacgttttttaattcattaatcatgaagtgctctgttccctaagttatgacatttagaagaaatcacatgctcaaccttaatctgagaacctaagtgtttttgagcattccagtaaaggagtagtgttcttttcctaacttacatcagggtacatctgtgtggcacacagatactatcttttcattcttcactcccagtcttaatttctttcccctgtatgtcactgtattttatgtcacttcacattgtgttaaacagggtaaatagagatcctcagtatctcagtgctgtggcatagctccaataggtgtgctgtggtgcactgcagtgatgtatttgcataacattgtttgatagtgaaaaattttttttcggttcaagtgttttgtgattaaaattttatgtttaattaaaatattgcataatattgatgggttcaaaaaccattaaaataatcaaacaattattctgtgcccttaacattattttcttgtgttttcaataaaattttcttttcatctttccatcttcacattctcttagcatcatcctatgcacataaggtatgttgttttccttctccactcacctaccgcactaaatttgatcagcaattgtacagtaacagaatatatttgtgccagaagatttgcaatgatatttgagcatgtatttatttaggaggaagccagtgcctgtaattatgtctcattgagtagttttactttgcccatcctgcagtatttagagctgatctgtacccaaagcaggacaatgtaactgtagatctgctttgttttcagtaactgtacattgcatcagaatctgtttatttctatctggaaacagacagaatggtgggggagggaaggagttattttgcatcctagtttgtattatgaagtcatcatatatatatttgaaatagtataagctaattactgttgcagaatgccctcgatataattatttcttttcagctggatgtgaaaagctgaagcagtgaaaacctgcagtcttatttcactggtttccttctgtttcttgtccatcacttctgtatccacagggagctatctactacatacctttggtaacaggctacattctcttcagattttttatatgaataatttcatcagcactaaagcattaacatagaataatgagccaaagtactgagtcgagatggctttcagttgagtttaatttcatatttaacttttgcatttaacttgtataatacactactgctgagaaaaacaattatgaatgccttctgcatgttgtacattatctctaacagagatggtgtcaattttaagaatacaaaggggtatagagttagaatggatgtgttcgtgcatatatatgttgtatttaaatattaatgtttacaagaagattttttttaaattcttcaaatacttcacttagtgaaataatgggccaatctggaatagagacattttatttggttagtgcaagagtgaaagctagcatttgttaaccttcacatatttatctgtgtacaattgtttttgcttctggtaatgaattattagaaaatggaagattttgttcaatgtttttggccctcaggtttactgtgtaaatctgcatttttggtggtaaatccctttgccacagattcagtagcttttggtaaacttcactgtttttaaagtaccttttgtgtaaaataaagatccaatttttataacaaatggcaaataaaaacagtaaatgctgg

SEQ ID NO: 2138 - DNA, 660 bp, Homo sapien
cggccagggcgccgacagcccgacctcaccaggagaacatgcagctcggcactgggctcctgctggccgccgtcctgagcctgcagctggctgcagccgaagccatatggtgtcaccagtgcacgggcttcggagggtgctcccatggatccagatgcctgagggactccacccactgtgtcaccactgccacccgggtcctcagcaacaccgaggatttgcctctggtcaccaagatgtgccacataggctgccccgatatccccagcctgggcctgggcccctacgtatccatcgcttgctgccagaccagcctctgcaaccatgactgacggctgccctcctccaggcccccggacgctcagcccccacagcccccacagcctggcgccagggctcacggccgcccctccctcgagactggccagcccacctctcccggcctctgcagccaccgtccagcaccgcttgtcctagggaagtcctgcgtggagtcttgcctcaatctgctgccgtccaagcctggggcccatcgtgcctgccgccccttcaggtcccgacctccccacaataaaatgtgattggatcgtgtggtacaaaaaaaaaaaaaaaaaaaaaaaaaaaaaaaaaaaaaaaaaaaaaaaaaaaaaaaaaaaaaaa

SEQ ID NO: 2139 - protein, 97 aa, Homo sapien
MQLGTGLLLAAVLSLQLAAAEAIWCHQCTGFGGCSHGSRCLRDSTHCVTTATRVLSNTEDLPLVTKMCHIGCPDIPSLGLGPYVSIACCQTSLCNHD

SEQ ID NO: 2140 - DNA, 503 bp, Homo sapien
ccaagatctccaaggattcggtggcatacccactccagcacacagaagcatgaggttcatgactctcctcttcctgacagctctggcaggagccctggtctgtgcctatgatccagaggccgcctctgccccaggatcggggaacccttgccatgaagcatcagcagctcaaaaggaaaatgcaggtgaagacccagggttagccagacaggcaccaaagccaaggaagcagagatccagccttctggaaaaaggcctagacggagcaaaaaaagctgtggggggactcggaaaactaggaaaagatgcagtcgaagatctagaaagcgtgggtaaaggagccgtccatgacgttaaagacgtccttgactcagtactatagctgtaaggagaagctgagaaatgatacccaggagcagcaggctttacgtcttcagcctaaaacctaaaaaaaaaaaaaaaaaaaaaatttaaaacagctattaaactgaaagcatctgtaa

SEQ ID NO: 2141 - protein, 110 aa, Homo sapien
MRFMTLLFLTALAGALVCAYDPEAASAPGSGNPCHEASAAQKENAGEDPGLARQAPKPRKQRSSLLEKGLDGAKKAVGGLGKLGKDAVEDLESVGKGAVHDVKDVLDSVL

SEQ ID NO: 2142 - DNA, 2160 bp, Homo sapien
ggcggcggcatggcgaggttcccgaaggccgacctggccgctgcaggagttatgttactttgccacttcttcacggaccagtttcagttcgccgatgggaaacccggagaccaaatccttgattggcagtatggagttactcaggccttccctcacacagaggaggaggtggaagttgattcacacgcgtacagccacaggtggaaaagaaacttggactttctcaaggcggtagacacgaaccgagcaagcgtcggccaagactctcctgagcccagaagcttcacagacctgctgctggatgatgggcaggacaataacactcagatcgaggaggatacagaccacaattactatatatctcgaatatatggtccatctgattctgccagccgggatttatgggtgaacatagaccaaatggaaaaagataaagtgaagattcatggaatattgtccaatactcatcggcaagctgcaagagtgaatctgtccttcgattttccattttatggccacttcctacgtgaaatcactgtggcaaccgggggtttcatatacactggagaagtcgtacatcgaatgctaacagccacacagtacatagcacctttaatggcaaatttcgatcccagtgtatccagaaattcaactgtcagatattttgataatggcacagcacttgtggtccagtgggaccatgtacatctccaggataattataacctgggaagcttcacattccaggcaaccctgctcatggatggacgaatcatctttggatacaaagaaattcctgtcttggtcacacagataagttcaaccaatcatccagtgaaagtcggactgtccgatgcatttgtcgttgtccacaggatccaacaaattcccaatgttcgaagaagaacaatttatgaataccaccgagtagagctacaaatgtcaaaaattaccaacatttcggctgtggagatgaccccattacccacatgcctccagtttaacagatgtggcccctgtgtatcttctcagattggcttcaactgcagttggtgtagtaaacttcaaagatgttccagtggatttgatcgtcatcggcaggactgggtggacagtggatgccctgaagagtcaaaagagaagatgtgtgagaatacagaaccagtggaaacttcttctcgaaccaccacaaccataggagcgacaaccacccagttcagggtcctaactaccaccagaagagcagtgacttctcagtttcccaccagcctccctacagaagatgataccaagatagcactacatctaaaagataatggagcttctacagatgacagtgcagctgagaagaaagggggaaccctccacgctggcctcatcgttggaatcctcatcctggtcctcattgtagccacagccattcttgtgacagtctatatgtatcaccacccaacatcagcagccagcatcttctttattgagagacgcccaagcagatggcctgcgatgaagtttagaagaggctctggacatcctgcctatgctgaagttgaaccagttggagagaaagaaggctttattgtatcagagcagtgctaaaatttctaggacagaacaacaccagtactggtttacaggtgttaagactaaaattttgcctatacctttaagacaaacaaacaaacacacacacaaacaagctctaagctgctgtagcctgaagaagacaagatttctggacaagctcagcccaggaaacaaagggtaaacaaaaaactaaaacttatacaagataccatttacactgaacatagaattccctagtggaatgtcatctatagttcactcggaacatctcccgtggacttatctgaagtatgacaagattataatgcttttggcttaggtgcagggttgcaaagggatcagaaaaaaaaaatcataataaagctttagttcatgagggatcgacacctttggttcaaatgttctctgatgtctcaaagataactgttttccaaagcctgaaccctttcactcaaaagagcaatgatgaatgtctcaagattgctaagaaaaacagcccatgcaagagtgagaacaaacacaaaataagagattttctacattttcaaaaaaaaaaaaaaaaaaaaaaaaaaa

SEQ ID NO: 2143 - protein, 529 aa, Homo sapien
MARFPKADLAAAGVMLLCHFFTDQFQFADGKPGDQILDWQYGVTQAFPHTEEEVEVDSHAYSHRWKRNLDFLKAVDTNRASVGQDSPEPRSFTDLLLDDGQDNNTQIEEDTDHNYYISRIYGPSDSASRDLWVNIDQMEKDKVKIHGILSNTHRQAARVNLSFDFPFYGHFLREITVATGGFIYTGEVVHRMLTATQYIAPLMANFDPSVSRNSTVRYFDNGTALVVQWDHVHLQDNYNLGSFTFQATLLMDGRIIFGYKEIPVLVTQISSTNHPVKVGLSDAFVVVHRIQQIPNVRRRTIYEYHRVELQMSKITNISAVEMTPLPTCLQFNRCGPCVSSQIGFNCSWCSKLQRCSSGFDRHRQDWVDSGCPEESKEKMCENTEPVETSSRTTTTIGATTTQFRVLTTTRRAVTSQFPTSLPTEDDTKIALHLKDNGASTDDSAAEKKGGTLHAGLIVGILILVLIVATAILVTVYMYHHPTSAASIFFIERRPSRWPAMKFRRGSGHPAYAEVEPVGEKEGFIVSEQC

SEQ ID NO: 2144 - DNA, 1749 bp, Homo sapien
gtttggttcgggcccttgcaaaacccgagatgatgagcctgtgtgtgggagacccctgggtatccgtgcagggcccaatgggactctctttgtggccgatgcatacaagggactatttgaagtaaatccctggaaacgtgaagtgaaactgctgctgtcctccgagacacccattgaggggaagaacatgtcctttgtgaatgatcttacagtcactcaggatgggaggaagatttatttcaccgattctagcagcaaatggcaaagacgagactacctgcttctggtgatggagggcacagatgacgggcgcctgctggagtatgatactgtgaccagggaagtaaaagttttattggaccagctgcggttcccgaatggagtccagctgtctcctgcagaagactttgtcctggtggcagaaacaaccatggccaggatacgaagagtctacgtttctggcctgatgaagggcggggctgatctgtttgtggagaacatgcctggatttccagacaacatccggcccagcagctctggggggtactgggtgggcatgtcgaccatccgccctaaccctgggttttccatgctggatttcttatctgagagaccctggattaaaaggatgatttttaagctctttagtcaagagacggtgatgaagtttgtgccgcggtacagcctcgtcctagaactcagcgacagcggtgccttccggagaagcctgcatgatcccgatgggctggtggccacctacatcagcgaggtgcacgaacacgatgggcacctgtacctgggctctttcaggtcccccttcctctgcagactcagcctccaggctgtttagccctcccagatagctgcccctgccacgcaggccaggagtcttcacactcaggcaccaggcctggtccaggaggagctgtggacacagtcgtggttcaagtgtccacatgcacctgttagtccctgagaggtggtgggaatggctgcttcattcctcgaggatgcccgggccccacctgggcttgtctttctgtttagagggaagtgtaacatatctgccatgaggaacataaattcatgtaaagccattttctcttaaacaaaacaaaactttctaagtacagtcattctctaggatttgggaagctccttgcacttggaacagggctcaggtgggtggagcagtaaggcactacccagagagcttgctgctgcggccctgtcctgcggcctcaaagttcttctttactatatataacgtgcggtcatacctttcttcgttgtggtggggatggaagagcagagggagcatggcccaggggtgttgaggccagcggtgagagccgtgttagccaagacatggaactgtgttctcaagggttatgtggggcgtgggctctccatagtgtgtatgaaaagcttgttgactctagcggctcagagaggactttgctgggtttctttctgtgaatatctccgtgctgaccatgctggaattggatgattctgcaattcgggacctactgcaggggtccgtttagtaacgtcttgtctgtgatctttgttcttgacctctagaccccaagatgtgaacagtgcacgtgttaatgtcatctttgctcatgtgttataagccccaagttgctgtatattttcacaagtatgtctacacactggtcatgattttgataataaataacgataaatcgaaaaaaaaaaaaaaaaaaaaaaaaaaaaaaa

SEQ ID NO: 2145 - protein, 220 aa, Homo sapien
MSFVNDLTVTQDGRKIYFTDSSSKWQRRDYLLLVMEGTDDGRLLEYDTVTREVKVLLDQLRFPNGVQLSPAEDFVLVAETTMARIRRVYVSGLMKGGADLFVENMPGFPDNIRPSSSGGYWVGMSTIRPNPGFSMLDFLSERPWIKRMIFKLFSQETVMKFVPRYSLVLELSDSGAFRRSLHDPDGLVATYISEVHEHDGHLYLGSFRSPFLCRLSLQAV

SEQ ID NO: 2146 - DNA, 2122 bp, Homo sapien
gggggagagggcttttcttatccacctcatgttggattatcccttggcactccattagatccgcattatgtgctcctagaagtccattatgataatcccacttatgaggaaggcttaatagataattctggactgaggttattttacacaatggatataaggaaatatgatgctggggtgattgaggctggcctctgggtgagcctcttccataccatccctccagggatgcctgagttccagtctgagggtcactgcactttggagtgcctggaagaggctctggaagccgaaaagccaagtggaattcatgtgtttgctgttcttctccatgctcacctggctggcagaggcatcaggctgcgtcattttcgaaaagggaaggaaatgaaattacttgcctatgatgacgattttgacttcaatttccaggagtttcagtatctaaaggaagaacaaacaatcttaccaggagattacctaattactgagtgtcgctacaacacgaaagatagagctgagatgacttggggaggactaagcaccaggagtgaaatgtgtctctcataccttctttattacccaagaattaatcttactcgatgtgcaagtattccagacattatggaacaacttcagttcattggggttaaggagatctacagaccagtcacgacctggcctttcattatcaaaagtcccaagcaatataaaaacctttctttcatggatgctatgaataagtttaaatggactaaaaaggaaggtctctccttcaacaagctggtcctcagcctgccagtgaatgtgagatgttccaagacagacaatgctgagtggtcgattcaaggaatgacagcattacctccagatatagaaagaccctataaagcggaacctttggtgtgtggcacgtcttcttcctcttccctgcatagagatttctccatcaacttgcttgtttgccttctgctactcagctgcacgctgagcaccaagagcttgtgatcaaaattctgttggacttgacaatgttttctatgatctgaacctgtcatttgaagtacaggttaaagactgtgtccactttgggcatgaagagtgtggagacttttcttccccattttccctccctcctttttcctttccatgttacatgagagacatcaatcaggttctcttctctttcttagaaatatctgatgttatatatacatggtcaataaaataaaactggcctgacttaagataaccattttaaaaaattgggctgtcatgtgggaataaaagaattctttctttcctactacattctgttttatttaaatactcattgttgctatttcactttttgacttgacttttatatttctttaaaaaattccttccttttaaaaaatataaaagggactactgttcattccagttttcttcttctttgttgttcttctagtgtgacttttcaagtgtaacagccattcttcctgactttaatattgtccagttctggtcttttctgtgaattaccactgggccccttacctcaatgctttttgttgatgcccactctggttcccttgtttatctgagtctgttggtacccctaatgaccccacacccatcttaaagtactttttttcaccttccctgtttagtactggccagatgagttttttctagagctctgtcactatctgaaaagaaagaggctatgggaaacatagaaatggtatgtattaataactgatcataggctgaggagaaaaaatgtagctggccgcaaacccagtgctgtgaggtgacttatatgaggttccagatcaaaggcaggccgtgtgagccagtccaggagggtgtaagttctgaatggttccttgctgactttgggtgacacatgtaccacatactggctcagtttaagtcatggttctattgtagatttatttttatattagttaataaatgactttaaattgtcaccaattgaaaatcttgtcactcttttggttttctttatatagctcagccaaatcttgttttatgtcctgtcctcatctcttaagctaaatctgtttggatcatattaataaactaaatgaaatcaaaaaaaaaaaaaaaaaaa

SEQ ID NO: 2147 - DNA, 3596 bp, Homo sapien
ggcacgagggtataagcaaccctaccataaaggacaatgggacattcagctgtgctgtgaagaatcccccagatgtgcaccataatattcccatgacagagctaacagtcacagaaaggggttttggcaccatgctttcctctgtggcccttctttccatccttgtctttgtgccctcagccgtggtggttgctctgctgctggtgagaatggggaggaaggctgctgggctgaagaagaggagcaggtctggctataagaagtcatctattgaggtttccgatgacactgatcaggaggaggaagaggcgtgtatggcgaggctttgtgtccgttgcgctgagtgcctggattcagactatgaagagacatattgatgaaagtctgtatgacacaagaagagtcacctaaagacaggaaacatcccattccactggcagctaaagcctgtcagagaaagtggagctggcctggaccatagcgatggacaatcctggagatcatcagtaaagactttaggaaccacttatttattgaataaatgttcttgttgtatttataaactgttcaggaagtctcataagagactcatgacttcccctttcaatgaattatgctgtaattgaatgaagaaattcttttcctgagcaaaaagatactttttgattcatctttgctctggaatgtattacatgttttcttccaactgtttgaaggagaattttgaatgtttgccacaccgctgatacccaaataattttttaaatgaagtggagcttgtggcttcctgatgtgtcaccagacaaaatattcgcttgggatatgtattctttgttttttgctccatgtacactttcagctgtgagttagtatagggcgtatacttaccggtttaatgacctcaacctcagttgtgtttggataacttagggtgtatacccttagtttccttagagttggtaggatcaagtcattggtttgctttgactgggtttttaaagtattaagtacagtgtcatcaatttacagttaaggaaaggaatcgtgaagtagaaaaattattttctttagtcttgctggtacaatttgggctaaggagtctttgttattttctgtcttgcttttttttttttttgaggcagagtctcactctgtcgccaggctggagtgcagtggtgtgatcttggctcactgcaacctctgcctcctgggttcaagcgattcttgtgcctcagcctctcgagtagctgggattacaggcaagcgccaccacacccagctaatttttgtgtttttagtagagacggggtttcaccattttggccaggatggtctcaatcccctgacctcgtgatccatctgcctcggcctcccaaagtgttgggattacaggcatgagccactgtgcttggcctgttattttattttcttataactacaacttttcttcttgaattttcaggtcagaggcaagaaaaactctttacaggtttttagtggggggcttatggagtatttcaggagttctttgcaattaaatcatcttttcacttgtattgtttttcaaaactttgttgatttctaaaatgtgccaactgtgagtaaactatggtatttgcaagtggtttttacataatatttgagatgaggaagtgagattgtgcatgacatacttctcctttgtattctctcagtgccttacagcaggttactccattctgctatgacaacttgtttcaaatgttaatttacataggattttttataagccattaaggcatatgtatagtatatcagtaaagatggatggtgcatatataaatagtcttctgtaatagtgattggatttacttctcaattatgagagacaaaaattatcccctcacctgtctctattctttcaacaggttgatcccttttcatgatttttcattaggtggttcaggaagtttccatattacagcgcttcagactgtatatgttagtttaaaaatcacttttctctctctcaacttctttcttttttttttgaagacttaatttaaaaaatttgggttgttagatccgtatcatagatttggcctagcctcttctgttaacctagtccacagatgagcgaatctggttagttgaaggacattgtgatttgactctggtcacgcgaggaagtagaagggcaaagacaggaccggcagtttacatttccagtggttaaacctcacggtactttgggactgcttgttaacttttgtggttgtctgaggccaatctaacgtgaccatttctgacacctcaacagagagaggaaagcaacttgagcaatgagagtaaataacttgggctctcagagatttgaagatagagatctcattgtgagggggactattttgcaggtcctcatttctccaagaaagagatggtgttacaggaacccactgaaagccatatcccattaaatgaggaactaattttggctgggccttcttgtaatgtcctcgcaggtgtgttgtgaagattaatgcagggtagtatgtttgtagattgacacctagtctaaacttgaggtaattggtgctctgtgaatactcagtcgtgttcttttatagccttaatcatgatttgaactagtcccttgctttttaaatgactgaatgaagtccttcgtggtaagggagtacgttgataacttagtttactatatgggtttgtggtcgcatcccagtcatcagctgctatcattttccttcttcatcccttatactgagatttgggttacagctttttattcttcgaaggatcacaaagcagtgtacagacacctgccttctttaaggatgaaaggaagataaagtggtctttttttgtttacttatttgtttcacctcttgtttgagtaacttctaaggtgctattctctctctctttttgctaccccatgagctcttgtcacagccatggaaaccagcctcgtttagaaagggaacttagttcagaaggggttaaaagccttccagaatttttctttagctgctgaagtttttacatgtggttacatgactttaagttttatgcattacgctcttaattctattacaaaatgtggactcaccaattgctttgtgttttccatgtgacctgttacttcaggctacttggggaacatcttagtcctctgtagctcctgaacccagcactggtgcttcaagagagaaggtagcacgtctttgttcaaaacaaaacaaaacgacacttctggaggccacatcctgaatatgaatgttctactaagtcactcagttatggttctaaagggaaactgtaagaagacccacaaggagtggaccaagactattatttaattgcacaacttgaaactttgctgccagaagaggcagctccattcctttgactccagtgttgggctgttaactgctgcacctcattgcctttttttgtttttgtttttgttttgtaggagggtaggcactgttgggccatatgcacaaatattgtaactcttggtatctttactgcatcatagtcaataaacttctttgtaccctttggctaaaaaaaaaaaaaaaaaaaaaaaaaaa

SEQ ID NO: 2148 - DNA, 1465 bp, Homo sapien
ggaataagaggggtaaatggaatagctgcatagcaacttggctctcaagcatcttaaatgttatcccttgacttctggcttccatggtttctgatgagaaattggctgctaatcttactgaagatcccttatagtgaatctgaatggtgcctaccctaagctggtgcctttcagacctgcaggacggctgatctctccacctctgctactctctgcgattttcaacattcttctcagcctggccatgcatattgcaggcttcatcctggttcagaggcagccttggtattccgtggagatacacagtgcctgcacagtacaaaatgaaagcatctcagagttaaccatgtctccaactgctccagaaaaaatggaaagtaatagcaccttcacaagttttgagaacactacagtctggttcttgggaacaatcaactgtatcactgtggctcttgtgttctctaaaggaaaaccatttagacagccaacttatacaaactatatatttgtccttgtgctgataatacagcttggtgtatgtctattcattctatttgctgatataccagaattatatagacgtttggatctgctctgcactcccgtcctgtggagggcctccattgtcatcatgctcagcttgaatttcattgtgtcccttgtggccgaggaggctgttattgaaaatcgagccctgtggatgatgattaaaagatgtttcggctatcagtcaaaaagccagtatcggatatggcagagggacttggcaaatgaccctagttggcccccgctaaaccaaacctcccactctgacatgccggagtgtggcagaggagtgtcttacagcaatccagtatttgagagcaatgaagaacaactctgaaggacatgtgatatccaagttgatattacagagaaacaatgacaaaagggaccagtttcattgattttaagaaatgagactcttgtaacatcagctggagttttggggctacctatcaaatcatggtgacaaactaaagtctgtttgataaaatactgtctacagagaagaacattgacccagaagagtgctttcctcttggcttctgaaggtattagaggcattcagtgaaggcaagaatgggccaagaatttctatgggccaagagacaagcaggctaaaggggaaaaatatgtgatctttcctcttaggacaggacaatactttcctttttataaaaatgagttgaggggaagtagtactgtgtatactcacggagttgtaatttttgaatttttacttcatcgatggaaaaactaatgcgtgggaaacattacaccaatctttactgtctgggttccttttctctgtagtacttttcagatttgaggctttttcttctgtttctggccttacccaacatattgttaaggataagcttagcctatgctgcaataaaaaacaactctcagataaaaaaaa

SEQ ID NO: 2149 - protein, 212 aa, Homo sapien
MHIAGFILVQRQPWYSVEIHSACTVQNESISELTMSPTAPEKMESNSTFTSFENTTVWFLGTINCITVALVFSKGKPFRQPTYTNYIFVLVLIIQLGVCLFILFADIPELYRRLDLLCTPVLWRASIVIMLSLNFIVSLVAEEAVIENRALWMMIKRCFGYQSKSQYRIWQRDLANDPSWPPLNQTSHSDMPECGRGVSYSNPVFESNEEQL

SEQ ID NO: 2150 - DNA, 732 bp, Homo sapien
atcggttagcgccttgccatgattaatccagagctgcgggatggcagagctgatggcttcatacatcggatagttcccaagttgatacaaaactggaagattggccttatgtgcttcctgagtattattattactacagtttgcattattatgatagccacatggtccaagcatgctaaacctgtggcatgttcaggggactggcttggagtgagagataagtgtttctatttttctgatgataccagaaattggacagccagtaaaatattttgtagtttgcagaaagcagaacttgctcagattgatacacaagaagacatggaatttttgaagaggtacgcaggaactgatatgcactggattggactaagcaggaaacaaggagattcttggaaatggacaaatggcaccacattcaatggttggccatcaaactccaaatggtcttgcaactggagcctccgacaatggcttcttctgctgggaccccttagataggcctctgagggagctctgactgccgtttccccaaaacaatgtcccctgtcagcaggaagcagttaaatcagtcttcatccttatccttaatataacggcagttagatgtacttctttagagggagtaaatttatcaattcagagcaattcatcctcctctttccatctttgattcacagttaataggctataaattttgataatgtagaataaactacagaaaacttcttg

SEQ ID NO: 2151 - protein, 160 aa, Homo sapien
MINPELRDGRADGFIHRIVPKLIQNWKIGLMCFLSIIITTVCIIMIATWSKHAKPVACSGDWLGVRDKCFYFSDDTRNWTASKIFCSLQKAELAQIDTQEDMEFLKRYAGTDMHWIGLSRKQGDSWKWTNGTTFNGWPSNSKWSCNWSLRQWLLLLGPLR

SEQ ID NO: 2152 - DNA, 1820 bp, Homo sapien
ctgactgatatttgaagaagtgttttcatctatccaagaaaaatatgatgtctccatcccaagcctcactcttattcttaaatgtatgtatttttatttgtggagaagctgtacaaggtaactgtgtacatcattctacggactcttcagtagttaacattgtagaagatggatctaatgcaaaagatgaaagtaaaagtaatgatactgtttgtaaggaagactgtgaggaatcatgtgatgttaaaactaaaattacacgagaagaaaaacatttcatgtgtagaaatttgcaaaattctattgtttcctacacaagaagtaccaaaaaactactaaggaatatgatggatgagcaacaagcttccttggattatttatctaatcaggttaacgagctcatgaatagagttctccttttgactacagaagtttttagaaaacagctggatccttttcctcacagacctgttcagtcacatggtttagattgcactgatattaaggataccattggctctgtcaccaaaacaccgagtggtttatacataattcacccagaaggatctagctacccatttgaggtaatgtgtgacatggattacagaggaggtggatggactgtgatacagaaaagaattgatgggataattgatttccagaggttgtggtgtgattatctggatggatttggagatcttctaggagaattttggctaggactgaaaaagattttttatatagtaaatcagaaaaataccagttttatgctgtatgtggctttggaatctgaagatgacactcttgcttatgcatcatatgataatttttggctagaggatgaaacgagattttttaaaatgcacttaggacggtattcaggaaatgctggtgatgcattccggggtctcaaaaaagaagataatcaaaatgcaatgccttttagcacatcagatgttgataatgatgggtgtcgccctgcatgcctggtcaatggtcagtctgtgaagagctgcagtcacctccataacaagaccggctggtggtttaacgagtgtggtctagcaaatctaaatggcattcatcacttctctggaaaattgcttgcaactggaattcaatggggcacgtggaccaaaaacaactcacctgtcaagattaaatctgtttcaatgaaaattagaagaatgtacaatccatattttaagtaatctcatttaacattgtaatgcaagttctacaatgataatatattaaagatttttaaaagtttatcttttcacttagtgtttcaaacatattaggcaaaatttaactgtagatggcatttagatgttatgagtttaattagaaaacttcaattttgtagtattctataaaagaaaacatggcttattgtatgtttttacttctgactatattaacaatatacaatgaaatttgtttcaagtgaactacaacttgtcttcctaaaatttatagtgattttaaaggattttgccttttctttgaagcatttttaaaccataatatgttgtaaggaaaattgaagggaatattttacttatttttatactttatatgattatataatctacagataatttctactgaagacagttacaataaataactttatgcagattaatatataagctacacatgatgtaaaaaccttactatttctaggtgatgccataccattttaaaagtagtaagagtttgctgcccaaatagtttttcttgttttcatatctaatcatggttaactattttgttattgtttgtaataaatatatgtacttttatatcctgaaaaa

SEQ ID NO: 2153 - protein, 388 aa, Homo sapien
MMSPSQASLLFLNVCIFICGEAVQGNCVHHSTDSSVVNIVEDGSNAKDESKSNDTVCKEDCEESCDVKTKITREEKHFMCRNLQNSIVSYTRSTKKLLRNMMDEQQASLDYLSNQVNELMNRVLLLTTEVFRKQLDPFPHRPVQSHGLDCTDIKDTIGSVTKTPSGLYIIHPEGSSYPFEVMCDMDYRGGGWTVIQKRIDGIIDFQRLWCDYLDGFGDLLGEFWLGLKKIFYIVNQKNTSFMLYVALESEDDTLAYASYDNFWLEDETRFFKMHLGRYSGNAGDAFRGLKKEDNQNAMPFSTSDVDNDGCRPACLVNGQSVKSCSHLHNKTGWWFNECGLANLNGIHHFSGKLLATGIQWGTWTKNNSPVKIKSVSMKIRRMYNPYFK

SEQ ID NO: 2154 - DNA, 2945 bp, Homo sapien
cggacgcgtggggcggcgagagcagctgcagttcgcatctcaggcagtacctagaggagctgccggtgcctcctcagaacatctcctgatcgctacccaggaccaggcaccaaggacagggagtcccaggcgcacaccccccattctgggtcccccaggcccagacccccactctgccacaggttgcatcttgacctggtcctcctgcagaagtggcccctgtggtcctgctctgagactcgtccctgggcgcccctgcagcccctttctatgactccatctggatttggctggctgtggggacgcggtccgaggggcggcctggctctcagcgtggtggcagccagctctctggccaccatggcaaatgctgagatctgaggggacaaggctctacagcctcagccaggggcactcagctgttgcagggtgtgatggagaacaaagctatgtacctacacaccgtcagcgactgtgacaccagctccatctgtgaggattcctttgatggcaggagcctgtccaagctgaacctgtgtgaggatggtccatgtcacaaacggcgggcaagcatctgctgtacccagctggggtccctgtcggccctgaagcatgctgtcctggggctctacctgctggtcttcctgattcttgtgggcatcttcatcttagcagggccaccgggacccaaaggtgatcagggggatgaaggaaaggaaggcaggcctggcatccctggattgcctggacttcgaggtctgcccggggagagaggtaccccaggattgcccgggcccaagggcgatgatgggaagctgggggccacaggaccaatgggcatgcgtgggttcaaaggtgaccgaggcccaaaaggagagaaaggagagaaaggagacagagctggggatgccagtggcgtggaggccccgatgatgatccgcctggtgaatggctcaggtccgcacgagggccgcgtggaagtgtaccacgaccggcgctggggcaccgtgtgtgacgacggctgggacaagaaggacggagacgtggtgtgccgcatgctcggcttccgcggtgtggaggaggtgtaccgcacagctcgattcgggcaaggcactgggaggatctggatggatgacgttgcctgcaagggcacagaggaaaccatcttccgctgcagcttctccaaatggggggtgacaaactgtggacatgccgaagatgccagcgtgacatgcaacagacactgaaagtgggcagagcccaagttcggggtcctgcacagagcacccttgctgcatccctggggtggggcacagctcggggccaccctgaccatgcctcgaccacaccccgtccagcattctcagtcctcacacctgcatcccaggaccgtgggggccggtcgtcatttccctcttgaacatgtgctccgaagtataactctgggacctactgcccgtctctctcttccaccaggttcctgcatgaggagccctgatcaactggatcaccactttgcccagcctctgaacaccatgcaccaggcctcaatatcccagttccctttggccttttagttacaggtgaatgctgagaatgtgtcagagacaagtgcagcagcagcgatggttggtagtatagatcatttactcttcagacaattcccaaacctccattagtccaagagtttctacatcttcctccccagcaagaggcaacgtcaagtgatgaatttcccccctttactctgcctctgctccccatttgctagtttgaggaagtgacatagaggagaagccagctgtaggggcaagagggaaatgcaagtcacctgcaggaatccagctagatttggagaagggaatgaaactaacattgaatgactaccatggcacgctaaatagtatcttgggtgccaaattcatgtatccacttagctgcattggtccagggcatgtcagtctggatacagccttaccttcaggtagcacttaactggtccattcacctagactgcaagtaagaagacaaaatgactgagaccgtgtgcccacctgaacttattgtctttacttggcctgagctaaaagcttgggtgcaggacctgtgtaactagaaagttgcctacttcagaacctccagggcgtgagtgcaaggtcaaacatgactggcttccaggccgaccatcaatgtaggaggagagctgatgtggagggtgacatgggggctgcccatgttaaacctgagtccagtgctctggcattgggcagtcacggttaaagccaagtcatgtgtgtctcagctgtttggaggtgatgattttgcatcttccaagcctcttcaggtgtgaatctgtggtcaggaaaacacaagtcctaatggaacccttaggggggaaggaaatgaagattccctataacctctgggggtggggagtaggaataaggggccttgggcctccataaatctgcaatctgcaccctcctcctagagacagggagatcgtgttctgctttttacatgaggagcagaactgggccatacacgtgttcaagaactaggggagctacctggtagcaagtgagtgcagacccacctcaccttgggggaatctcaaactcataggcctcagatacacgatcacctgtcatatcaggtgagcactggcctgcttggggagagacctgggcccctccaggtgtaggaacagcaacactcctggctgacaactaagccaatatggccctaggtcattcttgcttccaatatgcttgccactccttaaatgtcctaatgatgagaaactctctttctgaccaattgctatgtttacataacacgcatgtactcatgcatcccttgccagagcccatatatgtatgcatatataaacatagcactttttactacatagctcagcacattgcaaggtttgcatttaagtt

SEQ ID NO: 2155 - protein, 270 aa, Homo sapien
MENKAMYLHTVSDCDTSSICEDSFDGRSLSKLNLCEDGPCHKRRASICCTQLGSLSALKHAVLGLYLLVFLILVGIFILAGPPGPKGDQGDEGKEGRPGIPGLPGLRGLPGERGTPGLPGPKGDDGKLGATGPMGMRGFKGDRGPKGEKGEKGDRAGDASGVEAPMMIRLVNGSGPHEGRVEVYHDRRWGTVCDDGWDKKDGDVVCRMLGFRGVEEVYRTARFGQGTGRIWMDDVACKGTEETIFRCSFSKWGVTNCGHAEDASVTCNRH

SEQ ID NO: 2156 - DNA, 1714 bp, Homo sapien
catcctgcaacatggtgaaaccacgcctggctaattttgttgtatttttggtagagatgggatttcaccgtgttagccaggattgtctcaatctgacctcatgatctgcccgcctcggcctcccaaagtgctgggattacaggcgagtgcaaccacacccggccacaaactttttaagaagttaatgaaaccataccttttacatttttaatgacaggaaaatgctcacaataattgttaacccaaaattctggatacaaaagtacaatctttactgtgtaaatacatgtatatgtactatatgaaaatataccaaatatcaataatacttatctctgggtaaaaacctcttctcataccctgtgctaacaacttttaacaaaaaatttgcatcacttttaagaatcaagaaaaatttctgaaggtcatatgggacagaaaaaaaaaccaagggaaaaatcacgccacttgggaaaaaaagattcgaaatctgcctttttatagatttgtaattaataaggtccaggctttctaagcaacttaaatgttttgtttcgaaacaaagtacttgtctggatgtaggaggaaagggagtgatgtcactgccattatgatgccccttgaatataagaccctacttgctatctcccctgcaccagccaggagccacccatcctccagcacactgagcagcaagctggacacacggcacactgatccaaatgggtaaggggatggtggcgatgctcattctgggtctgctacttctggcgctgctcctacccgtgcaggtttcttcatttgttcctttaaccagtatgccggaagctactgcagccgaaaccacaaagccctccaacagtgccctacagcctacagccggtctccttgtggtcttgcttgcccttctacatctctaccattaagaggcaggtcaagaaacagctacagttctccaacccatacactaaaaccgaatccaaatggtgcctagaagttcaatgtggcaaggaaaaaaaccaggtcttcatcaaatctactaatttcactccttattaacagagaaacgcttgagagtctcaaactggactggtttaaagagcatctgaaggatttgactagatgataaatgcctgtactcccagtactttgggaggcctaggccggcggatcacctgaggtcaggagtttgagactaacctggccaaaatggtgaaaccccatctgtactaaaaatacaaatattgactgggcgtggtggtgagtgcctgtgatcccagctactcaggtggctgaagcaggacaatcacttgaactcaggaggcagaggttgcagtgagctgagatcgcgctactgcactctagcctagcctgggcaacagagtgagacttcgtctcaaaaaaaaaaaagccaagtgcagtggctcacgcctgtaatcccggcactttgggaggccgaggtgggcggatcacgaggtcaggagatcaagaccatcctggctaatacagtgaaaccctgtctctactaaaaatacaaaaaattagccggggatggtggcaggcacctggagtcccagctactcgggaggctgaggcaggagaatagcgtgaactcaggaggcggagcttgcagtgagccgagattgcgctactgcactccagcctgggcgacagcgcgagactccgtctcaaaaaaaaaaaaaaaaaaaaaaaa

SEQ ID NO: 2157 - protein, 67 aa, Homo sapien
MGKGMVAMLILGLLLLALLLPVQVSSFVPLTSMPEATAAETTKPSNSALQPTAGLLVVLLALLHLYH

SEQ ID NO: 2158 - DNA, 774 bp, Homo sapien
aagcacctgcctggcaacatggggtccagcagcttcttggtcctcatggtgtctctcgttcttgtgaccctggtggctgtggaaggagttaaagagggtatagagaaagcaggggtttgcccagctgacaacgtacgctgcttcaagtccgatcctccccagtgtcacacagaccaggactgtctgggggaaaggaagtgttgttacctgcactgtggcttcaagtgtgtgattcctgtgaaggaactggaagaaggaggaaacaaggatgaagatgtgtcaaggccataccctgagccaggatgggaggccaagtgtccaggctcctcctctaccaggtgtcctcagaaatgatgctgggtcctttctacctctgggggtcactctcacttggcacctgcccctgagggtcctgagacttggaatatggaagaagcaatacccaaccccaccaaagaaaacctgagcttgaagtccttttccccaaaaagagggaagagtcacaaaaagtccagaccccagggacggtactttccctctctacctggtgctcctccctaatgctcatgaatggacccctcatgaatgaaaccagtgcccttataagagaccccaaagagctgccttgcccttctgcaatgtgtgatcacagctagaaggcactgtcagagaagagaaactggtcctcaccagatgctgaatctgctggtgccttgatcttggacttcccagcctctagaactgtaagaaataaatatttgctgtttataatcc

SEQ ID NO: 2159 - protein, 111 aa, Homo sapien
MGSSSFLVLMVSLVLVTLVAVEGVKEGIEKAGVCPADNVRCFKSDPPQCHTDQDCLGERKCCYLHCGFKCVIPVKELEEGGNKDEDVSRPYPEPGWEAKCPGSSSTRCPQK

SEQ ID NO: 2160 - DNA, 1278 bp, Homo sapien
ggcacgaggaggtgtggacgctgtgtatgaaatgtctttcctccaggacccaagtttcttcaccatggggatgtggtccattggtgcaggagccctgggggctgctgccttggcattgctgcttgccaacacagacgtgtttctgtccaagccccagaaagcggccctggagtacctggaggatatagacctgaaaacactggagaaggaaccaaggactttcaaagcaaaggagctatgggaaaaaaatggagctgtgattatggccgtgcggaggccaggctgtttcctctgtcgagaggaagctgcggatctgtcctccctgaaaagcatgttggaccagctgggcgtccccctctatgcagtggtaaaggagcacatcaggactgaagtgaaggatttccagccttatttcaaaggagaaatcttcctggatgaaaagaaaaagttctatggtccacaaaggcggaagatgatgtttatgggatttatccgtctgggagtgtggtacaacttcttccgagcctggaacggaggcttctctggaaacctggaaggagaaggcttcatccttgggggagttttcgtggtgggatcaggaaagcagggcattcttcttgagcaccgagaaaaagaatttggagacaaagtaaacctactttctgttctggaagctgctaagatgatcaaaccacagactttggcctcagagaaaaaatgattgtgtgaaactgcccagctcagggataaccagggacattcacctgtgttcatgggatgtattgtttccactcgtgtccctaaggagtgagaaacccatttatactctactctcagtatggattattaatgtattttaatattctgtttaggcccactaaggcaaaatagccccaaaacaagactgacaaaaatctgaaaaactaatgaggattattaagctaaaacctgggaaataggaggcttaaaattgactgccaggctgggtgcagtggctcacacctgtaatcccagcactttgggaggccaaggtgagcaagtcacttgaggtcgggagttcgagaccagcctgagcaacatggcgaaaccccgtctctactaaaaatacaaaaatcacccgggtgtggtggcaggcacctgtagtcccagctacccgggaggctgaggcaggagaatcacttgaacctgggaggtggaggttgcggtgagctgagatcacaccactgtattccagcctgggtgactgagactctaactaaaaaaaaaaaaaaaaaaaaa

SEQ ID NO: 2161 - protein, 216 aa, Homo sapien
MWSIGAGALGAAALALLLANTDVFLSKPQKAALEYLEDIDLKTLEKEPRTFKAKELWEKNGAVIMAVRRPGCFLCREEAADLSSLKSMLDQLGVPLYAVVKEHIRTEVKDFQPYFKGEIFLDEKKKFYGPQRRKMMFMGFIRLGVWYNFFRAWNGGFSGNLEGEGFILGGVFVVGSGKQGILLEHREKEFGDKVNLLSVLEAAKMIKPQTLASEKK

SEQ ID NO: 2162 - DNA, 396 bp, Homo sapien
ctttgaagcatttttgtctgtgctccctgatcttcaggtcaccaccatgaagttcttagcagtcctggtactcttgggagtttccatctttctggtctctgcccagaatccgacaacagctgctccagctgacacgtatccagctactggtcctgctgatgatgaagcccctgatgctgaaaccactgctgctgcaaccactgcgaccactgctgctcctaccactgcaaccaccgctgcttctaccactgctcgtaaagacattccagttttacccaaatgggttggggatctcccgaatggtagagtgtgtccctgagatggaatcagcttgagtcttctgcaattggtcacaactattcatgcttcctgtgatttcatccaactacttacctt

SEQ ID NO: 2163 - protein, 90 aa, Homo sapien
MKFLAVLVLLGVSIFLVSAQNPTTAAPADTYPATGPADDEAPDAETTAAATTATTAAPTTATTAASTTARKDIPVLPKWVGDLPNGRVCP

SEQ ID NO: 2164 - DNA, 2476 bp, Homo sapien
aagcaaccaaactgcaagctttgggagttgttcgctgtccctgccctgctctgctagggagagaacgccagagggaggcggctggcccggcggcaggctctcagaaccgctaccggcgatgctactgctgtgggtgtcggtggtcgcagccttggcgctggcggtactggcccccggagcaggggagcagaggcggagagcagccaaagcgcccaatgtggtgctggtcgtgagcgactccttcgatggaaggttaacatttcatccaggaagtcaggtagtgaaacttccttttatcaactttatgaagacacgtgggacttcctttctgaatgcctacacaaactctccaatttgttgcccatcacgcgcagcaatgtggagtggcctcttcactcacttaacagaatcttggaataattttaagggtctagatccaaattatacaacatggatggatgtcatggagaggcatggctaccgaacacagaaatttgggaaactggactatacttcaggacatcactccattagtaatcgtgtggaagcgtggacaagagatgttgctttcttactcagacaagaaggcaggcccatggttaatcttatccgtaacaggactaaagtcagagtgatggaaagggattggcagaatacagacaaagcagtaaactggttaagaaaggaagcaattaattacactgaaccatttgttatttacttgggattaaatttaccacacccttacccttcaccatcttctggagaaaattttggatcttcaacatttcacacatctctttattggcttgaaaaagtgtctcatgatgccatcaaaatcccaaagtggtcacctttgtcagaaatgcaccctgtagattattactcttcttatacaaaaaactgcactggaagatttacaaaaaaagaaattaagaatattagagcattttattatgctatgtgtgctgagacagatgccatgcttggtgaaattattttggcccttcatcaattagatcttcttcagaaaactattgtcatatactcctcagaccatggagagctggccatggaacatcgacagttttataaaatgagcatgtacgaggctagtgcacatgttccgcttttgatgatgggaccaggaattaaagccggcctacaagtatcaaatgtggtttctcttgtggatatttaccctaccatgcttgatattgctggaattcctctgcctcagaacctgagtggatactctttgttgccgttatcatcagaaacatttaagaatgaacataaagtcaaaaacctgcatccaccctggattctgagtgaattccatggatgtaatgtgaatgcctccacctacatgcttcgaactaaccactggaaatatatagcctattcggatggtgcatcaatattgcctcaactctttgatctttcctcggatccagatgaattaacaaatgttgctgtaaaatttccagaaattacttattctttggatcagaagcttcattccattataaactaccctaaagtttctgcttctgtccaccagtataataaagagcagtttatcaagtggaaacaaagtataggacagaattattcaaacgttatagcaaatcttaggtggcaccaagactggcagaaggaaccaaggaagtatgaaaatgcaattgatcagtggcttaaaacccatatgaatccaagagcagtttgaacaaaaagtttaaaaatagtgttctagagatacatataaatatattacaagatcataattatgtattttaaatgaaacagttttaataattaccaagttttggccgggcacagtggctcacacctgtaatcccaggactttgggaggctgaggaaagcagatcacaaggtcaagagattgagaccatcctggccaacatggtgaaaccctgtctctactaaaaatacaaaaattagctgggcgcggtggtgcacacctatagtctcagctactcagaggctgaggcaggaggatcgcttgaacccgggaggcagcagttgcagtgagctgagattgcgccactgtactccagcctggcaacagagtgagactgtgtcgcaaaaaaataaaaataaaataataataattaccaatttttcattattttgtaagaatgtagtgtattttaagataaaatgccaatgattataaaatcacatattttcaaaaatggttattatttaggcctttgtacaatttctaacaatttagtggaagtatcaaaaggattgaagcaaatactgtaacagttatgttcctttaaataatagagaatataaaatattgtaataatatgtatcataaaatagttgtatgtgagcatttgatggtgaaaaaaaaaaaaaaaaaaaaaaaaaaaaaaaaaaaaaaaaaaaaaaaaaaaaaaaaaaaaaaaaaaaaaaaaaaaaaaaaaaaaaaaaaaaaaaa

SEQ ID NO: 2165 - protein, 536 aa, Homo sapien
MLLLWVSVVAALALAVLAPGAGEQRRRAAKAPNVVLVVSDSFDGRLTFHPGSQVVKLPFINFMKTRGTSFLNAYTNSPICCPSRAAMWSGLFTHLTESWNNFKGLDPNYTTWMDVMERHGYRTQKFGKLDYTSGHHSISNRVEAWTRDVAFLLRQEGRPMVNLIRNRTKVRVMERDWQNTDKAVNWLRKEAINYTEPFVIYLGLNLPHPYPSPSSGENFGSSTFHTSLYWLEKVSHDAIKIPKWSPLSEMHPVDYYSSYTKNCTGRFTKKEIKNIRAFYYAMCAETDAMLGEIILALHQLDLLQKTIVIYSSDHGELAMEHRQFYKMSMYEASAHVPLLMMGPGIKAGLQVSNVVSLVDIYPTMLDIAGIPLPQNLSGYSLLPLSSETFKNEHKVKNLHPPWILSEFHGCNVNASTYMLRTNHWKYIAYSDGASILPQLFDLSSDPDELTNVAVKFPEITYSLDQKLHSIINYPKVSASVHQYNKEQFIKWKQSIGQNYSNVIANLRWHQDWQKEPRKYENAIDQWLKTHMNPRAV

SEQ ID NO: 2166 - DNA, 3338 bp, Homo sapien
cccagcccggccccgccgccccggctgcgcacgcgacgccccctccaggccccgctcctgcgccctatttggtcattcggggggcaagcggcgggaggggaaacgtgcgcggccgaaggggaagcggagccggcgccggctgcgcagaggagccgctctcgccgccgccacctcggctgggagcccacgaggctgccgcatcctgccctcggaacaatgggactcggcgcgcgaggtgcttgggccgcgctgctcctggggacgctgcaggtgctagcgctgctgggggccgcccatgaaagcgcagccatggcggagactctccaacatgtgccttctgaccatacaaatgaaacttccaacagtactgtgaaaccaccaacttcagttgcctcagactccagtaatacaacggtcaccaccatgaaacctacagcggcatctaatacaacaacaccagggatggtctcaacaaatatgacttctaccaccttaaagtctacacccaaaacaacaagtgtttcacagaacacatctcagatatcaacatccacaatgaccgtaacccacaatagttcagtgacatctgctgcttcatcagtaacaatcacaacaactatgcattctgaagcaaagaaaggatcaaaatttgatactgggagctttgttggtggtattgtattaacgctgggagttttatctattctttacattggatgcaaaatgtattactcaagaagaggcattcggtatcgaaccatagatgaacatgatgccatcatttaaggaaatccatggaccaaggatggaatacagattgatgctgccctatcaattaattttggtttattaatagtttaaaacaatattctctttttgaaaatagtataaacaggccatgcatataatgtacagtgtattacgtaaatatgtaaagattcttcaaggtaacaagggtttgggttttgaaataaacatctggatcttatagaccgttcatacaatggttttagcaagttcatagtaagacaaacaagtcctatctttttttttttggctggggtgggggcattggtcacatatgaccagtaattgaaagacgtcatcactgaaagacagaatgccatctgggcatacaaataagaagtttgtcacagcactcaggattttgggtatcttttgtagctcacataaagaacttcagtgcttttcagagctggatatatcttaattactaatgccacacagaaattatacaatcaaactagatctgaagcataatttaagaaaaacatcaacattttttgtgctttaaactgtagtagttggtctagaaacaaaatactccaagaaaaagaaaattttcaaataaaacccaaaataatagctttgcttagccctgttagggatccattggagcattaaggagcacatatttttattaacttcttttgagctttcaatgttgatgtaatttttgttctctgtgtaatttaggtaaactgcagtgtttaacataataatgttttaaagacttagttgtcagtattaaataatcctggcattatagggaaaaaacctcctagaagttagattatttgctactgtgagaatattgtcaccactggaagttactttagttcatttaattttaattttatattttgtgaatattttaagaactgtagagctgctttcaatatctagaaatttttaattgagtgtaaacacacctaactttaagaaaaagaaccgcttgtatgattttcaaaagaacatttagaattctatagagtcaaaactatagcgtaatgctgtgtttattaagccagggattgtgggacttcccccaggcaactaaacctgcaggatgaaaatgctatattttctttcatgcactgtcgatattactcagatttggggaaatgacatttttatactaaaacaaacaccaaaatattttagaataaattcttagaaagttttgagaggaatttttagagaggacatttcctccttcctgatttggatattccctcaaatccctcctcttactccatgctgaaggagaagtactctcagatgcattatgttaatggagagaaaaagcacagtattgtagagacaccaatattagctaatgtattttggagtgttttccattttacagtttatattccagcactcaaaactcagggtcaagttttaacaaaagaggtatgtagtcacagtaaatactaagatggcatttctatctcagagggccaaagtgaatcacaccagtttctgaaggtcctaaaaatagctcagatgtcctaatgaacatgcacctacatttaataggagtacaataaaactgttgtcagcttttgttttacagagaacgctagatattaagaattttgaaatggatcatttctacttgctgtgcattttaaccaataatctgatgaatatagaaaaaaatgatccaaaatatggatatgattggatgtatgtaacacatacatggagtatggaggaaattttctgaaaaatacatttagattagtttagtttgaaggagaggtgggctgatggctgagttgtatgttactaacttggccctgactggttgtgcaaccattgcttcatttctttgcaaaatgtagttaagatatactttattctaatgaaggccttttaaatttgtccactgcattcttggtatttcactacttcaagtcagtcagaacttcgtagaccgacctgaagtttctttttgaatacttgtttctttagcactttgaagatagaaaaaccactttttaagtactaagtcatcatttgccttgaaagtttcctctgcattgggtttgaagtagtttagttatgtctttttctctgtatgtaagtagtataatttgttactttcaaatacccgtactttgaatgtaggtttttttgttgttgttatctataaaaattgagggaaatggttatgcaaaaaaatattttgctttggaccatatttcttaagcataaaaaaatgctcagttttgcttgcattccttgagaatgtatttatctgaagatcaaaacaaacaatccagatgtataagtactaggcagaagccaattttaaaatttccttgaataatccatgaaaggaataattcaaatacagataaacagagttggcagtatattatagtgataattttgtattttcaamaaaaaaaaagttaaactcttcttttctttttattataatgaccagcttttggtatttcattgttaccaagttctatttttagataaaattgttctccttctaaaaaaaaaaaaaaaaaaaaaaa

SEQ ID NO: 2167 - protein, 189 aa, Homo sapien
MGLGARGAWAALLLGTLQVLALLGAAHESAAMAETLQHVPSDHTNETSNSTVKPPTSVASDSSNTTVTTMKPTAASNTTTPGMVSTNMTSTTLKSTPKTTSVSQNTSQISTSTMTVTHNSSVTSAASSVTITTTMHSEAKKGSKFDTGSFVGGIVLTLGVLSILYIGCKMYYSRRGIRYRTIDEHDAII

SEQ ID NO: 2168 - DNA, 4314 bp, Homo sapien
cgagatcccggggagccagcttgctgggagagcgggacggtccggagcaagcccagaggcagaggaggcgacagagggaaaaagggccgagctagccgctccagtgctgtacaggagccgaagggacgcaccacgccagccccagcccggctccagcgacagccaacgcctcttgcagcgcggcggcttcgaagccgccgcccggagctgccctttcctcttcggtgaagtttttaaaagctgctaaagactcggaggaagcaaggaaagtgcctggtaggactgacggctgcctttgtcctcctcctctccaccccgcctccccccaccctgccttccccccctcccccgtcttctctcccgcagctgcctcagtcggctactctcagccaacccccctcaccacccttctccccacccgcccccccgcccccgtcggcccagcgctgccagcccgagtttgcagagaggtaactccctttggctgcgagcgggcgagctagctgcacattgcaaagaaggctcttaggagccaggcgactggggagcggcttcagcactgcagccacgacccgcctggttaggctgcacgcggagagaaccctctgttttcccccactctctctccacctcctcctgccttccccaccccgagtgcggagccagagatcaaaagatgaaaaggcagtcaggtcttcagtagccaaaaaacaaaacaaacaaaaacaaaaaagccgaaataaaagaaaaagataataactcagttcttatttgcacctacttcagtggacactgaatttggaaggtggaggattttgtttttttcttttaagatctgggcatcttttgaatctacccttcaagtattaagagacagactgtgagcctagcagggcagatcttgtccaccgtgtgtcttcttctgcacgagactttgaggctgtcagagcgctttttgcgtggttgctcccgcaagtttccttctctggagcttcccgcaggtgggcagctagctgcagcgactaccgcatcatcacagcctgttgaactcttctgagcaagagaaggggaggcggggtaagggaagtaggtggaagattcagccaagctcaaggatggaagtgcagttagggctgggaagggtctaccctcggccgccgtccaagacctaccgaggagctttccagaatctgttccagagcgtgcgcgaagtgatccagaacccgggccccaggcacccagaggccgcgagcgcagcacctcccggcgccagtttgctgctgctgcagcagcagcagcagcagcagcagcagcagcagcagcagcagcagcagcagcagcagcagcagcagcaagagactagccccaggcagcagcagcagcagcagggtgaggatggttctccccaagcccatcgtagaggccccacaggctacctggtcctggatgaggaacagcaaccttcacagccgcagtcggccctggagtgccaccccgagagaggttgcgtcccagagcctggagccgccgtggccgccagcaaggggctgccgcagcagctgccagcacctccggacgaggatgactcagctgccccatccacgttgtccctgctgggccccactttccccggcttaagcagctgctccgctgaccttaaagacatcctgagcgaggccagcaccatgcaactccttcagcaacagcagcaggaagcagtatccgaaggcagcagcagcgggagagcgagggaggcctcgggggctcccacttcctccaaggacaattacttagggggcacttcgaccatttctgacaacgccaaggagttgtgtaaggcagtgtcggtgtccatgggcctgggtgtggaggcgttggagcatctgagtccaggggaacagcttcggggggattgcatgtacgccccacttttgggagttccacccgctgtgcgtcccactccttgtgccccattggccgaatgcaaaggttctctgctagacgacagcgcaggcaagagcactgaagatactgctgagtattcccctttcaagggaggttacaccaaagggctagaaggcgagagcctaggctgctctggcagcgctgcagcagggagctccgggacacttgaactgccgtctaccctgtctctctacaagtccggagcactggacgaggcagctgcgtaccagagtcgcgactactacaactttccactggctctggccggaccgccgccccctccgccgcctccccatccccacgctcgcatcaagctggagaacccgctggactacggcagcgcctgggcggctgcggcggcgcagtgccgctatggggacctggcgagcctgcatggcgcgggtgcagcgggacccggttctgggtcaccctcagccgccgcttcctcatcctggcacactctcttcacagccgaagaaggccagttgtatggaccgtgtggtggtggtgggggtggtggcggcggcggcggcggcggcggcggcggcggcggcggcggcggcggcggcgaggcgggagctgtagccccctacggctacactcggccccctcaggggctggcgggccaggaaagcgacttcaccgcacctgatgtgtggtaccctggcggcatggtgagcagagtgccctatcccagtcccacttgtgtcaaaagcgaaatgggcccctggatggatagctactccggaccttacggggacatgcgtttggagactgccagggaccatgttttgcccattgactattactttccaccccagaagacctgcctgatctgtggagatgaagcttctgggtgtcactatggagctctcacatgtggaagctgcaaggtcttcttcaaaagagccgctgaagggaaacagaagtacctgtgcgccagcagaaatgattgcactattgataaattccgaaggaaaaattgtccatcttgtcgtcttcggaaatgttatgaagcagggatgactctgggagcccggaagctgaagaaacttggtaatctgaaactacaggaggaaggagaggcttccagcaccaccagccccactgaggagacaacccagaagctgacagtgtcacacattgaaggctatgaatgtcagcccatctttctgaatgtcctggaagccattgagccaggtgtagtgtgtgctggacacgacaacaaccagcccgactcctttgcagccttgctctctagcctcaatgaactgggagagagacagcttgtacacgtggtcaagtgggccaaggccttgcctggcttccgcaacttacacgtggacgaccagatggctgtcattcagtactcctggatggggctcatggtgtttgccatgggctggcgatccttcaccaatgtcaactccaggatgctctacttcgcccctgatctggttttcaatgagtaccgcatgcacaagtcccggatgtacagccagtgtgtccgaatgaggcacctctctcaagagtttggatggctccaaatcaccccccaggaattcctgtgcatgaaagcactgctactcttcagcattattccagtggatgggctgaaaaatcaaaaattctttgatgaacttcgaatgaactacatcaaggaactcgatcgtatcattgcatgcaaaagaaaaaatcccacatcctgctcaagacgcttctaccagctcaccaagctcctggactccgtgcagcctattgcgagagagctgcatcagttcacttttgacctgctaatcaagtcacacatggtgagcgtggactttccggaaatgatggcagagatcatctctgtgcaagtgcccaagatcctttctgggaaagtcaagcccatctatttccacacccagtgaagcattggaaaccctatttccccaccccagctcatgccccctttcagatgtcttctgcctgttataactctgcactactcctctgcagtgccttggggaatttcctctattgatgtacagtctgtcatgaacatgttcctgaattctatttgctgggctttttttttctctttctctcctttctttttcttcttccctccctatctaaccctcccatggcaccttcagactttgcttcccattgtggctcctatctgtgttttgaatggtgttgtatgcctttaaatctgtgatgatcctcatatggcccagtgtcaagttgtgcttgtttacagcactactctgtgccagccacacaaacgtttacttatcttatgccacgggaagtttagagagctaagattatctggggaaatcaaaacaaaaacaagcaaac

SEQ ID NO: 2169 - protein, 920 aa, Homo sapien
MEVQLGLGRVYPRPPSKTYRGAFQNLFQSVREVIQNPGPRHPEAASAAPPGASLLLLQQQQQQQQQQQQQQQQQQQQQQQETSPRQQQQQQGEDGSPQAHRRGPTGYLVLDEEQQPSQPQSALECHPERGCVPEPGAAVAASKGLPQQLPAPPDEDDSAAPSTLSLLGPTFPGLSSCSADLKDILSEASTMQLLQQQQQEAVSEGSSSGRAREASGAPTSSKDNYLGGTSTISDNAKELCKAVSVSMGLGVEALEHLSPGEQLRGDCMYAPLLGVPPAVRPTPCAPLAECKGSLLDDSAGKSTEDTAEYSPFKGGYTKGLEGESLGCSGSAAAGSSGTLELPSTLSLYKSGALDEAAAYQSRDYYNFPLALAGPPPPPPPPHPHARIKLENPLDYGSAWAAAAAQCRYGDLASLHGAGAAGPGSGSPSAAASSSWHTLFTAEEGQLYGPCGGGGGGGGGGGGGGGGGGGGGGGEAGAVAPYGYTRPPQGLAGQESDFTAPDVWYPGGMVSRVPYPSPTCVKSEMGPWMDSYSGPYGDMRLETARDHVLPIDYYFPPQKTCLICGDEASGCHYGALTCGSCKVFFKRAAEGKQKYLCASRNDCTIDKFRRKNCPSCRLRKCYEAGMTLGARKLKKLGNLKLQEEGEASSTTSPTEETTQKLTVSHIEGYECQPIFLNVLEAIEPGVVCAGHDNNQPDSFAALLSSLNELGERQLVHVVKWAKALPGFRNLHVDDQMAVIQYSWMGLMVFAMGWRSFTNVNSRMLYFAPDLVFNEYRMHKSRMYSQCVRMRHLSQEFGWLQITPQEFLCMKALLLFSIIPVDGLKNQKFFDELRMNYIKELDRIIACKRKNPTSCSRRFYQLTKLLDSVQPIARELHQFTFDLLIKSHMVSVDFPEMMAEIISVQVPKILSGKVKPIYFHTQ

SEQ ID NO: 2170 - DNA, 732 bp, Homo sapien
tgctgcgaaccacgtgggtcccgggcgcgtttcgggtgctggcggctgcagccggagttcaaacctaagcagctggaaggaaccatggccaactgtgagcgtaccttcattgcgatcaaaccagatggggtccagcggggtcttgtgggagagattatcaagcgttttgagcagaaaggattccgccttgttggtctgaaattcatgcaagcttccgaagatcttctcaaggaacactacgttgacctgaaggaccgtccattctttgccggcctggtgaaatacatgcactcagggccggtagttgccatggtctgggaggggctgaatgtggtgaagacgggccgagtcatgctcggggagaccaaccctgcagactccaagcctgggaccatccgtggagacttctgcatacaagttggcaggaacattatacatggcagtgattctgtggagagtgcagagaaggagatcggcttgtggtttcaccctgaggaactggtagattacacgagctgtgctcagaactggatctatgaatgacaggagggcagaccacattgcttttcacatccatttcccctccttcccatgggcagaggaccaggctgtaggaaatctagttatttacaggaacttcatcataatttggagggaagctcttggagctgtgagttctccctgtacagtgttaccatccccgaccatctgattaaaatgcttcctcccagc

SEQ ID NO: 2171 - protein, 152 aa, Homo sapien
MANCERTFIAIKPDGVQRGLVGEIIKRFEQKGFRLVGLKFMQASEDLLKEHYVDLKDRPFFAGLVKYMHSGPVVAMVWEGLNVVKTGRVMLGETNPADSKPGTIRGDFCIQVGRNIIHGSDSVESAEKEIGLWFHPEELVDYTSCAQNWIYE

SEQ ID NO: 2172 - DNA, 369 bp, Homo sapien
atgaagcttctcacgggcctggttttctgctccttggtcctgggtgtcagcagccgaagcttcttttcgttccttggcgaggcttttgatggggctcgggacatgtggagagcctactctgacatgagagaagccaattacatcggctcagacaaatacttccatgctcgggggaactatgatgctgccaaaaggggacctgggggtgtctgggctgcagaagcgatcagcgatgccagagagaatatccagagattctttggccatggtgcggaggactcgctggctgatcaggctgccaatgaatggggcaggagtggcaaagaccccaatcacttccgacctgctggcctgcctgagaaatactga

SEQ ID NO: 2173 - protein, 122 aa, Homo sapien
MKLLTGLVFCSLVLGVSSRSFFSFLGEAFDGARDMWRAYSDMREANYIGSDKYFHARGNYDAAKRGPGGVWAAEAISDARENIQRFFGHGAEDSLADQAANEWGRSGKDPNHFRPAGLPEKY

SEQ ID NO: 2174 - DNA, 2691 bp, Homo sapien
gcttgcccgtcggtcgctagctcgctcggtgcgcgtcgtcccgctccatggcgctcttcgtgcggctgctggctctcgccctggctctggccctgggccccgccgcgaccctggcgggtcccgccaagtcgccctaccagctggtgctgcagcacagcaggctccggggccgccagcacggccccaacgtgtgtgctgtgcagaaggttattggcactaataggaagtacttcaccaactgcaagcagtggtaccaaaggaaaatctgtggcaaatcaacagtcatcagctacgagtgctgtcctggatatgaaaaggtccctggggagaagggctgtccagcagccctaccactctcaaacctttacgagaccctgggagtcgttggatccaccaccactcagctgtacacggaccgcacggagaagctgaggcctgagatggaggggcccggcagcttcaccatcttcgcccctagcaacgaggcctgggcctccttgccagctgaagtgctggactccctggtcagcaatgtcaacattgagctgctcaatgccctccgctaccatatggtgggcaggcgagtcctgactgatgagctgaaacacggcatgaccctcacctctatgtaccagaattccaacatccagatccaccactatcctaatgggattgtaactgtgaactgtgcccggctcctgaaagccgaccaccatgcaaccaacggggtggtgcacctcatcgataaggtcatctccaccatcaccaacaacatccagcagatcattgagatcgaggacacctttgagacccttcgggctgctgtggctgcatcagggctcaacacgatgcttgaaggtaacggccagtacacgcttttggccccgaccaatgaggccttcgagaagatccctagtgagactttgaaccgtatcctgggcgacccagaagccctgagagacctgctgaacaaccacatcttgaagtcagctatgtgtgctgaagccatcgttgcggggctgtctgtagagaccctggagggcacgacactggaggtgggctgcagcggggacatgctcactatcaacgggaaggcgatcatctccaataaagacatcctagccaccaacggggtgatccactacattgatgagctactcatcccagactcagccaagacactatttgaattggctgcagagtctgatgtgtccacagccattgaccttttcagacaagccggcctcggcaatcatctctctggaagtgagcggttgaccctcctggctcccctgaattctgtattcaaagatggaacccctccaattgatgcccatacaaggaatttgcttcggaaccacataattaaagaccagctggcctctaagtatctgtaccatggacagaccctggaaactctgggcggcaaaaaactgagagtttttgtttatcgtaatagcctctgcattgagaacagctgcatcgcggcccacgacaagagggggaggtacgggaccctgttcacgatggaccgggtgctgacccccccaatggggactgtcatggatgtcctgaagggagacaatcgctttagcatgctggtagctgccatccagtctgcaggactgacggagaccctcaaccgggaaggagtctacacagtctttgctcccacaaatgaagccttccgagccctgccaccaagagaacggagcagactcttgggagatgccaaggaacttgccaacatcctgaaataccacattggtgatgaaatcctggttagcggaggcatcggggccctggtgcggctaaagtctctccaaggtgacaagctggaagtcagcttgaaaaacaatgtggtgagtgtcaacaaggagcctgttgccgagcctgacatcatggccacaaatggcgtggtccatgtcatcaccaatgttctgcagcctccagccaacagacctcaggaaagaggggatgaacttgcagactctgcgcttgagatcttcaaacaagcatcagcgttttccagggcttcccagaggtctgtgcgactagcccctgtctatcaaaagttattagagaggatgaagcattagcttgaagcactacaggaggaatgcaccacggcagctctccgccaatttctctcagatttccacagagactgtttgaatgttttcaaaaccaagtatcacactttaatgtacatgggccgcaccataatgagatgtgagccttgtgcatgtgggggaggagggagagagatgtactttttaaatcatgttccccctaaacatggctgttaacccactgcatgcagaaacttggatgtcactgcctgacattcacttccagagaggacctatcccaaatgtggaattgactgcctatgccaagtccctggaaaaggagcttcagtattgtggggctcataaaacatgaatcaagcaatccagcctcatgggaagtcctggcacagtttttgtaaagcccttgcacagctggagaaatggcatcattataagctatgagttgaaatgttctgtcaaatgtgtctcacatctacacgtggcttggaggcttttatggggccctgtccaggtagaaaagaaatggtatgtagagcttagatttccctattgtgacagagccatggtgtgtttgtaataataaaaccaaagaaacata

SEQ ID NO: 2175 - protein, 683 aa, Homo sapien
MALFVRLLALALALALGPAATLAGPAKSPYQLVLQHSRLRGRQHGPNVCAVQKVIGTNRKYFTNCKQWYQRKICGKSTVISYECCPGYEKVPGEKGCPAALPLSNLYETLGVVGSTTTQLYTDRTEKLRPEMEGPGSFTIFAPSNEAWASLPAEVLDSLVSNVNIELLNALRYHMVGRRVLTDELKHGMTLTSMYQNSNIQIHHYPNGIVTVNCARLLKADHHATNGVVHLIDKVISTITNNIQQIIEIEDTFETLRAAVAASGLNTMLEGNGQYTLLAPTNEAFEKIPSETLNRILGDPEALRDLLNNHILKSAMCAEAIVAGLSVETLEGTTLEVGCSGDMLTINGKAIISNKDILATNGVIHYIDELLIPDSAKTLFELAAESDVSTAIDLFRQAGLGNHLSGSERLTLLAPLNSVFKDGTPPIDAHTRNLLRNHIIKDQLASKYLYHGQTLETLGGKKLRVFVYRNSLCIENSCIAAHDKRGRYGTLFTMDRVLTPPMGTVMDVLKGDNRFSMLVAAIQSAGLTETLNREGVYTVFAPTNEAFRALPPRERSRLLGDAKELANILKYHIGDEILVSGGIGALVRLKSLQGDKLEVSLKNNVVSVNKEPVAEPDIMATNGVVHVITNVLQPPANRPQERGDELADSALEIFKQASAFSRASQRSVRLAPVYQKLLERMKH

SEQ ID NO: 2176 - DNA, 2984 bp, Homo sapien
taactgagcgaggagcaattgattaatagctcggcgaggggactcactgactgttataataacactacaccagcaactcctggcttcccagcagccggaacacagacaggagagagtcagtggcaaatagacatttttcttatttcttaaaaaacagcaacttgtttgctacttttatttctgttgatttttttttcttggtgtgtgtggtggttgtttttaagtgtggagggcaaaaggagataccatcccaggctcagtccaacccctctccaaaacggcttttctgacactccaggtagcgagggagttgggtctccaggttgtgcgaggagcaaatgatgaccgccaaggccgtagacaaaatcccagtaactctcagtggttttgtgcaccagctgtctgacaacatctacccggtggaggacctcgccgccacgtcggtgaccatctttcccaatgccgaactgggaggcccctttgaccagatgaacggagtggccggagatggcatgatcaacattgacatgactggagagaagaggtcgttggatctcccatatcccagcagctttgctcccgtctctgcacctagaaaccagaccttcacttacatgggcaagttctccattgaccctcagtaccctggtgccagctgctacccagaaggcataatcaatattgtgagtgcaggcatcttgcaaggggtcacttccccagcttcaaccacagcctcatccagcgtcacctctgcctcccccaacccactggccacaggacccctgggtgtgtgcaccatgtcccagacccagcctgacctggaccacctgtactctccgccaccgcctcctcctccttattctggctgtgcaggagacctctaccaggacccttctgcgttcctgtcagcagccaccacctccacctcttcctctctggcctacccaccacctccttcctatccatcccccaagccagccacggacccaggtctcttcccaatgatcccagactatcctggattctttccatctcagtgccagagagacctacatggtacagctggcccagaccgtaagccctttccctgcccactggacaccctgcgggtgccccctccactcactccactctctacaatccgtaactttaccctggggggccccagtgctggggtgaccggaccaggggccagtggaggcagcgagggaccccggctgcctggtagcagctcagcagcagcagcagccgccgccgccgccgcctataacccacaccacctgccactgcggcccattctgaggcctcgcaagtaccccaacagacccagcaagacgccggtgcacgagaggccctacccgtgcccagcagaaggctgcgaccggcggttctcccgctctgacgagctgacacggcacatccgaatccacactgggcataagcccttccagtgtcggatctgcatgcgcaacttcagccgcagtgaccacctcaccacccatatccgcacccacaccggtgagaagcccttcgcctgtgactactgtggccgaaagtttgcccggagtgatgagaggaagcgccacaccaagatccacctgagacagaaagagcggaaaagcagtgccccctctgcatcggtgccagccccctctacagcctcctgctctgggggcgtgcagcctgggggtaccctgtgcagcagtaacagcagcagtcttggcggagggccgctcgccccttgctcctctcggacccggacaccttgagatgagactcaggctgatacaccagctcccaaaggtcccggaggccctttgtccactggagctgcacaacaaacactaccaccctttcctgtccctctctccctttgttgggcaaagggctttggtggagctagcactgccccctttccacctagaagcaggttcttcctaaaacttagcccattctagtctctcttaggtgagttgactatcaacccaaggcaaaggggaggctcagaaggaggtggtgtggggatcccctggccaagagggctgaggtctgaccctgctttaaagggttgtttgactaggttttgctaccccacttccccttattttgacccatcacaggtttttgaccctggatgtcagagttgatctaagacgttttctacaataggttgggagatgctgatcccttcaagtggggacagcaaaaagacaagcaaaactgatgtgcactttatggcttgggactgatttgggggacattgtacagtgagtgaagtatagcctttatgccacactctgtggccctaaaatggtgaatcagagcatatctagttgtctcaacccttgaagcaatatgtattatatactcagagaacagaagtgcaatgtgatgggaggaacgtagcaatatctgctccttttcgagttgtttgagaaatgtaggctattttttcagtgtatatccactcagattttgtgtatttttgatgtacccacactgttctctaaattctgaatctttgggaaaaaatgtaaagcatttatgatctcagaggttaacttatttaagggggatgtacatattctctgaaactaggatgcatgcaattgtgttggaagtgtccttggtcgccttgtgtgatgtagacaaatgttacaaggctgcatgtaaatgggttgccttattatggagaaaaaaatcactccctgagtttagtatggctgtatatttatgcctattaatatttggaattttttttagaaagtatatttttgtatgctttgttttgtgacttaaaagtgttacctttgtagtcaaatttcagataagaatgtacataatgttaccggagctgatttgtttggtcattagctcttaatagttgtgaaaaaataaatctattctaacgcaaaaccactaactgaagttcagatataatggatggtttgtgactatagtgtaaataaatacttttcaacaat

SEQ ID NO: 2177 - protein, 476 aa, Homo sapien
MMTAKAVDKIPVTLSGFVHQLSDNIYPVEDLAATSVTIFPNAELGGPFDQMNGVAGDGMINIDMTGEKRSLDLPYPSSFAPVSAPRNQTFTYMGKFSIDPQYPGASCYPEGIINIVSAGILQGVTSPASTTASSSVTSASPNPLATGPLGVCTMSQTQPDLDHLYSPPPPPPPYSGCAGDLYQDPSAFLSAATTSTSSSLAYPPPPSYPSPKPATDPGLFPMIPDYPGFFPSQCQRDLHGTAGPDRKPFPCPLDTLRVPPPLTPLSTIRNFTLGGPSAGVTGPGASGGSEGPRLPGSSSAAAAAAAAAAYNPHHLPLRPILRPRKYPNRPSKTPVHERPYPCPAEGCDRRFSRSDELTRHIRIHTGHKPFQCRICMRNFSRSDHLTTHIRTHTGEKPFACDYCGRKFARSDERKRHTKIHLRQKERKSSAPSASVPAPSTASCSGGVQPGGTLCSSNSSSLGGGPLAPCSSRTRTP

SEQ ID NO: 2178 - DNA, 1639 bp, Homo sapien
agcagagcacacaagcttctaggacaagagccaggaagaaaccaccggaaggaaccatctcactgtgtgtaaacatgacttccaagctggccgtggctctcttggcagccttcctgatttctgcagctctgtgtgaaggtgcagttttgccaaggagtgctaaagaacttagatgtcagtgcataaagacatactccaaacctttccaccccaaatttatcaaagaactgagagtgattgagagtggaccacactgcgccaacacagaaattattgtaaagctttctgatggaagagagctctgtctggaccccaaggaaaactgggtgcagagggttgtggagaagtttttgaagagggctgagaattcataaaaaaattcattctctgtggtatccaagaatcagtgaagatgccagtgaaacttcaagcaaatctacttcaacacttcatgtattgtgtgggtctgttgtagggttgccagatgcaatacaagattcctggttaaatttgaatttcagtaaacaatgaatagtttttcattgtaccatgaaatatccagaacatacttatatgtaaagtattatttatttgaatctacaaaaaacaacaaataatttttaaatataaggattttcctagatattgcacgggagaatatacaaatagcaaaattgagccaagggccaagagaatatccgaactttaatttcaggaattgaatgggtttgctagaatgtgatatttgaagcatcacataaaaatgatgggacaataaattttgccataaagtcaaatttagctggaaatcctggatttttttctgttaaatctggcaaccctagtctgctagccaggatccacaagtccttgttccactgtgccttggtttctcctttatttctaagtggaaaaagtattagccaccatcttacctcacagtgatgttgtgaggacatgtggaagcactttaagttttttcatcataacataaattattttcaagtgtaacttattaacctatttattatttatgtatttatttaagcatcaaatatttgtgcaagaatttggaaaaatagaagatgaatcattgattgaatagttataaagatgttatagtaaatttattttattttagatattaaatgatgttttattagataaatttcaatcagggtttttagattaaacaaagaaacaattgggtacccagttaaattttcatttcagataaacaacaaataattttttagtataagtacattattgtttatctgaaagttttaattgaactaacaatcctagtttgatactcccagtcttgtcattgccagctgtgttggtagtgctgtgttgaattacggaataatgagttagaactattaaaacagccaaaactccacagtcaatattagtaatttcttgctggttgaaacttgtttattatgtacaaatagattcttataatattatttaaatgactgcatttttaaatacaaggctttatatttttaactttaagatgtttttatgtgctctccaaattttttttactgtttctgattgtatggaaatataaaagtaaatatgaaacatttaaaatataatttgttgtcaaagtaaaaaaaaaaaaaaa

SEQ ID NO: 2179 - protein, 99 aa, Homo sapien
MTSKLAVALLAAFLISAALCEGAVLPRSAKELRCQCIKTYSKPFHPKFIKELRVIESGPHCANTEIIVKLSDGRELCLDPKENWVQRVVEKFLKRAENS

SEQ ID NO: 2180 - DNA, 1536 bp, Homo sapien
  Unsure 1101: Unknown base
atgaagctcttttggttgcttttcaccattgggttctgctgggctcagtattcctcaaatacacaacaaggacgaacatctattgttcatctgtttgaatggcgatgggttgatattgctcttgaatgtgagcgatatttagctcccaagggatttggaggggttcaggtctctccaccaaatgaaaatgttgccattcacaaccctttcagaccttggtgggaaagataccaaccagttagctataaattatgcacaagatctggaaatgaagatgaatttagaaacatggtgactagatgcaacaatgttggggttcgtatttatgtggatgctgtaattaatcatatgtgtggtaatgctgtgagtgcaggaacaagcagtacctgtggaagttacttcaaccctggaagtagggactttccagcagtcccatattctggatgggattttaatgatggtaaatgtaaaactggaagtggagatatcgagaactataatgatgctactcaggtcagagattgtcgtctgtctggtcttctcgatcttgcactggggaaggattatgtgcgttctaagattgccgaatatatgaaccatctcattgacattggtgttgcagggttcagaattgatgcttccaagcacatgtggcctggagacataaaggcaattttggacaaactgcataatctaaacagtaactggttcccggaaggtagtaaacctttcatttaccaggaggtaattgatctgggtggtgagccaattaaaagcagtgactactttggtaatggccgggtgacagaattcaagtatggtgcaaaactcggcacagttattcgcaagtggaatggagagaagatgtcttacttaaagaactggggagaaggttggggtttcatgccttctgacagagcgcttgtctttgtggataaccatgacaatcaacgaggacatggcgctggaggagcctctatacttaccttctgggatgctaggctgtacaaaatggcagttggatttatgcttgctcatccttatggatttacacgagtaatgtcaagctaccgttggccaagatattttgaaaatggaaangatgttaatgattgggttgggccaccaaatgataatggagtaactaaagaagttactattaatccagacactacttgtggcaatgactgggtctgtgaacatcgatggcgccaaataaggaacatggttaatttccgcaatgtagtggatggccagccttttacaaactggtatgataatgggagcaaccaagtggcttttgggagaggaaacagaggattcattgttttcaacaatgatgactggacattttctttaactttgcaaactggtcttcctgctggcacatactgtgatgtcatttctggagataaaattaatggcaactgcacaggcattaaaatctacgtttctgatgatggcaaagctcatttttctattagtaactctgctgaagatccatttattgcaattcatgctgaatctaaattgtaa

SEQ ID NO: 2181 - protein, 511 aa, Homo sapien
  unsure 367: unknown amino acid
  Unsure 1101: Unknown amino acid
MKLFWLLFTIGFCWAQYSSNTQQGRTSIVHLFEWRWVDIALECERYLAPKGFGGVQVSPPNENVAIHNPFRPWWERYQPVSYKLCTRSGNEDEFRNMVTRCNNVGVRIYVDAVINHMCGNAVSAGTSSTCGSYFNPGSRDFPAVPYSGWDFNDGKCKTGSGDIENYNDATQVRDCRLSGLLDLALGKDYVRSKIAEYMNHLIDIGVAGFRIDASKHMWPGDIKAILDKLHNLNSNWFPEGSKPFIYQEVIDLGGEPIKSSDYFGNGRVTEFKYGAKLGTVIRKWNGEKMSYLKNWGEGWGFMPSDRALVFVDNHDNQRGHGAGGASILTFWDARLYKMAVGFMLAHPYGFTRVMSSYRWPRYFENGXDVNDWVGPPNDNGVTKEVTINPDTTCGNDWVCEHRWRQIRNMVNFRNVVDGQPFTNWYDNGSNQVAFGRGNRGFIVFNNDDWTFSLTLQTGLPAGTYCDVISGDKINGNCTGIKIYVSDDGKAHFSISNSAEDPFIAIHAESKL

SEQ ID NO: 2182 - DNA, 3331 bp, Homo sapien
agggattcttctgcctccacttcaggttttagcagcttggtgctaaattgctgtctcaaaatgcagaggatctaatttgcagaggaaaacagccaaagaaggaagaggaggaaaaggaaaaaaaaaggggtatattgtggatgctctacttttcttggaaatgcaaaagattatgcatatttctgtcctcctttctcctgttttatggggactgatttttggtgtctcttctaacagcatacagataggggggctatttcctaggggcgccgatcaagaatacagtgcatttcgagtagggatggttcagttttccacttcggagttcagactgacaccccacatcgacaatttggaggtggcaaacagcttcgcagtcactaatgctttctgctcccagttttcgagaggagtctatgctatttttggattttatgacaagaagtctgtaaataccatcacatcattttgcggaacactccacgtctccttcatcactcccagcttcccaacagatggcacacatccatttgtcattcagatgagacccgacctcaaaggagctctccttagcttgattgaatactatcaatgggacaagtttgcatacctctatgacagtgacagaggcttatcaacactgcaagctgtgctggattctgctgctgaaaagaaatggcaagtgactgctatcaatgtgggaaacattaacaatgacaagaaagatgagatgtaccgatcactttttcaagatctggagttaaaaaaggaacggcgtgtaattctggactgtgaaagggataaagtaaacgacattgtagaccaggttattaccattggaaaacacgttaaagggtaccactacatcattgcaaatctggaatttactgatggagacctattaaaaatccagtttggaggtgcaaatgtctctggatttcagatagtggactatgatgattcgttggtatctaaatttatagaaagatggtcaacactggaagaaaaagaataccctggagctcacacaacaacaattaagtatacttctgctctgacctatgatgccgttcaagtgatgactgaagccttccgcaacctaaggaagcaaagaattgaaatctcccgaagggggaatgcaggagactgtctggcaaacccagcagtgccctggggacaaggtgtagaaatagaaagggccctcaaacaggttcaggttgaaggtctctcaggaaatataaagtttgaccagaatggaaaaagaataaactatacaattaacatcatggagctcaaaactaatgggccccggaagattggctactggagtgaagtggacaaaatggttgttacccttactgagctcccttctggaaatgacacctctgggcttgagaataagactgttgttgtcaccacaattttggaatctccgtatgttatgatgaagaaaaatcatgaaatgcttgaaggcaatgagcgctatgagggctactgtgttgacctggctgcagaaatcgccaaacattgtgggttcaagtacaagttgacaattgttggtgatggcaagtatggggccagggatgcagacacgaaaatttggaatgggatggttggagaacttgtatatgggaaagctgatattgcaattgctccattaactattacccttgtgagagaagaggtgattgacttctcaaagcccttcatgagcctcgggatatctatcatgatcaagaagcctcagaagtccaaaccaggagtgttttcctttcttgatcctttagcctatgagatctggatgtgcattgtttttgcctacattggggtcagtgtagttttattcctggtcagcagatttagcccctacgagtggcacactgaggagtttgaagatggaagagaaacacaaagtagtgaatcaactaatgaatttgggatttttaatagtctctggttttccttgggtgcctttatgcggcaaggatgcgatatttcgccaagatccctctctgggcgcattgttggaggtgtgtggtggttctttaccctgatcataatctcctcctacacggctaacttagctgccttcctgactgtagagaggatggtgtctcccatcgaaagtgctgaggatctttctaagcaaacagaaattgcttatggaacattagactctggctccactaaagagtttttcaggagatctaaaattgcagtgtttgataaaatgtggacctacatgcggagtgcggagccctctgtgtttgtgaggactacggccgaaggggtggctagagtgcggaagtccaaagggaaatatgcctacttgttggagtccacgatgaacgagtacattgagcaaaggaagccttgcgacaccatgaaagttggtggaaacctggattccaaaggctatggcatcgcaacacctaaaggatcctcattaggaaccccagtaaatcttgcagtattgaaactcagtgagcaaggcgtcttagacaagctgaaaaacaaatggtggtacgataaaggtgaatgtggagccaaggactctggaagtaaggaaaagaccagtgccctcagtctgagcaacgttgctggagtattctacatccttgtcgggggccttggtttggcaatgctggtggctttgattgagttctgttacaagtcaagggccgaggcgaaacgaatgaaggtggcaaagaatgcacagaatattaacccatcttcctcgcagaattcacagaattttgcaacttataaggaaggttacaacgtatatggcatcgaaagtgttaaaatttaggggatgaccttgaatgatgccatgaggaacaaggcaaggctgtcaattacaggaagtactggagaaaatggacgtgttatgactccagaatttcccaaagcagtgcatgctgtcccttacgtgagtcctggcatgggaatgaatgtcagtgtgactgatctctcgtgattgataagaaccttttgagtgccttacacaatggttttcttgtgtgtttattgtcaaagtggtgagaggcatccagtatcttgaagacttttctttcagccaagaattcttaaatatgtggagttcatcttgaattgtaaggaatgattaattaaaacacaacatctttttctactcgagttacagacaaagcgtggtggacatgcacagctaacatggaagtactataatttacctgaagtctttgtacagacaacaaacctgtttctgcagccactattgttagtctcttgattcataatgacttaagcacacttgacatcaactgcatcaagatgtgacatgttttat

SEQ ID NO: 2183 - protein, 883 aa, Homo sapien
MQKIMHISVLLSPVLWGLIFGVSSNSIQIGGLFPRGADQEYSAFRVGMVQFSTSEFRLTPHIDNLEVANSFAVTNAFCSQFSRGVYAIFGFYDKKSVNTITSFCGTLHVSFITPSFPTDGTHPFVIQMRPDLKGALLSLIEYYQWDKFAYLYDSDRGLSTLQAVLDSAAEKKWQVTAINVGNINNDKKDEMYRSLFQDLELKKERRVILDCERDKVNDIVDQVITIGKHVKGYHYIIANLEFTDGDLLKIQFGGANVSGFQIVDYDDSLVSKFIERWSTLEEKEYPGAHTTTIKYTSALTYDAVQVMTEAFRNLRKQRIEISRRGNAGDCLANPAVPWGQGVEIERALKQVQVEGLSGNIKFDQNGKRINYTINIMELKTNGPRKIGYWSEVDKMVVTLTELPSGNDTSGLENKTVVVTTILESPYVMMKKNHEMLEGNERYEGYCVDLAAEIAKHCGFKYKLTIVGDGKYGARDADTKIWNGMVGELVYGKADIAIAPLTITLVREEVIDFSKPFMSLGISIMIKKPQKSKPGVFSFLDPLAYEIWMCIVFAYIGVSVVLFLVSRFSPYEWHTEEFEDGRETQSSESTNEFGIFNSLWFSLGAFMRQGCDISPRSLSGRIVGGVWWFFTLIIISSYTANLAAFLTVERMVSPIESAEDLSKQTEIAYGTLDSGSTKEFFRRSKIAVFDKMWTYMRSAEPSVFVRTTAEGVARVRKSKGKYAYLLESTMNEYIEQRKPCDTMKVGGNLDSKGYGIATPKGSSLGTPVNLAVLKLSEQGVLDKLKNKWWYDKGECGAKDSGSKEKTSALSLSNVAGVFYILVGGLGLAMLVALIEFCYKSRAEAKRMKVAKNAQNINPSSSQNSQNFATYKEGYNVYGIESVKI

SEQ ID NO: 2184 - DNA, 1015 bp, Homo sapien
ggcacgaggcccgtcagctgtcccagagcctgtgtcgcgcccgtgccggtagcgcccgtgccggtagcgccgctgccaccgctcaccatgggcccgggtcctcggctgctgctacctctcgtgctttgcgtggggctcggcgcacttgtgttttcttcgggggccgagggcttccgcaagcgaggcccctcggtgacggccaaggtcttctttgatgtgaggattggagacaaagatgttggcagaattgtgattggcctctttggaaaagttgtgcccaagacagtggaaaattttgttgctctagcaacaggagagaaaggatatggatataaaggaagcaagtttcatcgtgtcatcaaggatttcatgattcaaggaggtgacatcaccactggagatggcactgggggtgtgagcatctatggtgagacatttccagatgagaacttcaagctgaagcactatggcattgggtgggtcagcatggccaacgctgggcctgacaccaatggctctcagttctttatcaccttgaccaagcccacctggttggacggcaaacatgtggtgtttggaaaagtcattgatgggatgacagtggtgcactccatagagctccaagcaactgatgggcatgaccgtccactcaccaactgctcgatcatcaacagtggcaagatagacgtgaaaacgccttttgtggttgagatcgctgattggtgacacaactggcagaaaacaaggatatgctttggcaggggtgtgtgtgtgtgtgtgtgtgtgtgtgtgttgtgttgtctttcaattatttgctttttttttttactttctttttgtattctatcccagatcacaggaaagttataaaaatcaaaccgtcaccctttagtttgcttgaactttagtaaaccacctgcttagggactttgaacttaaatatatccccttcctcaagtggtgctattttaaaactaaaaaaaactttgaattggcaaaaaaaaaaaaaaaaaaa

SEQ ID NO: 2185 - protein, 212 aa, Homo sapien
MGPGPRLLLPLVLCVGLGALVFSSGAEGFRKRGPSVTAKVFFDVRIGDKDVGRIVIGLFGKVVPKTVENFVALATGEKGYGYKGSKFHRVIKDFMIQGGDITTGDGTGGVSIYGETFPDENFKLKHYGIGWVSMANAGPDTNGSQFFITLTKPTWLDGKHVVFGKVIDGMTVVHSIELQATDGHDRPLTNCSIINSGKIDVKTPFVVEIADW

SEQ ID NO: 2186 - DNA, 3171 bp, Homo sapien
ggcacgagatgacaccaagcaaagcctacttagtttagatctccagaaattggctggtggaaaaaaatcaaacatgaagattgcagttttgttttgtttttttctgcttatcatttttcaaactgactttggaaaaaatgaagaaattcctaggaagcaaaggaggaagatctaccacagaaggttgaggaaaagttcaacctcacacaagcacagatcaaacagacagcttggaattcagcaaacaacagtttttacaccagtagcaagacttcctattgttaactttgattatagcatggaggaaaagtttgaatccttttcaagttttcctggagtagaatcaagttataatgtgttaccaggaaagaagggacactgtttggtaaagggcataaccatgtacaacaaagctgtgtggtcgcctgagccctgcactacctgcctctgctcagatggaagagttctttgtgatgaaaccatgtgccatccccagaggtgcccccaaacagttatacctgaaggggaatgctgcccggtctgctccgctactgtctcctattctctactcagtggtatagcattaaatgatagaaatgaattttctggtgattcttcagaacaaagagaacctaccaatttacttcataagcaactgccacctcctcaggtgggaatggaccgaatagtaagaaaagaagcacttcaatctgaggaggatgaagaagtgaaagaagaagatacagagcaaaagagagagacccctgaatctagaaatcaggggcaactttacagtgagggggacagcagaggaggagacagaaagcagaggcctggagaggagaggaggctggcacaccagcaacaacgccaaggaagggaggaggaggaggatgaggaggaggagggtgaggagggtgaggaggatgaggaggacgaggaggacccggtaagaggagatatgttccgaatgccctctcgatccccgcttcctgctcctcccagaggcacactgcgcctgccaagcgggtgctctctgtcctacaggaccatcagctgcatcaacgccatgcttacccagataccaccgctgacagcaccacagataacaagtctggagctcactggcaattccatcgcctccatcccagatgaagcatttaatggattaccaaatttggaaaggcttgatctgagtaaaaataatatcacttcttcaggcataggtccaaaagcattcaagcttctgaagaagttaatgcgtttgaatatggatggaaataatttgatacagattccttcacaattgccatctacattagaagaacttaaagtcaatgagaacaatcttcaggctatcgatgaagaaagtttatcagacttaaatcagttggtcaccttagaattggaaggaaacaatctcagtgaagccaatgtcaatcctttagctttcaaacctttgaagagcctagcctacttgcgtctgggaaaaaataaatttagaattataccgcagggtcttcctggttctattgaggaattatacctagaaaataaccaaattgaagaaataactgaaatttgtttcaatcataccagaaagatcaatgtcattgtactacgttataacaaaattgaagaaaataggattgctcctttagcctggataaatcaagaaaatctagaatccattgatctctcctacaacaagctctatcacgtcccgtcctatctacccaagtccttgctgcacctagtactccttgggaaccagattgaacggatccctggctatgtgtttggccacatggaaccaggcctggaatacttgtacctgtcatttaacaaacttgctgatgatggcatggaccgtgtctccttctatggggcatatcattctctgagagaattatttctggatcacaatgacttaaaatctataccacctgggatacaagaaatgaaagcactacattttctgaggctgaacaacaacaagatacggaacattcttccagaagaaatttgcaatgctgaagaggatgatgactcaaatctggaacatcttcatcttgaaaacaattatattaaaattagagaaataccatcttacacattttcatgcataagatcatactcaagtatcgttcttaaaccacaaaacatcaagtaattccaagttttcctttgctgtttataaactttactcatgtatttgtagtagctgcatttgtcattaataagagagacataatcctcctgttatactcagtatcattatatgctagtcaacctgattcactaacacacagatgaacaaccaaaatatacctaaaaggtatagtctctaggagttttattaatagtaaaggtaaaatctctcagtttcctacctctagaaagaggccatctcactagaataggatattatgcatactgagctagaccagaagagtctggaacaaaataaacacagcctttataatcaacttgaatactggtgttagctgagaactctgtaagtccctttaaaaattatgtatcttttggttcaagattaagaagcataatgacaacaaaaaaagcaggcagaatttatgaataagtgttgtttattattaaaacaataatttgttaatttcttataaggtcctgtgctataattactggtataaatataactgaatattggggtagctttcatttcttccattaattacatgtgtaaaattaaaacactactgtaatgttaatttcctggttttgaaaatcatattatggttatgtacattgttaacattaaggaaagctggcagaagggtgtgcataaattctatactctttttgaaacttttctataattctaaaattattttttaaagttaaacagtatattaagattaccttcactattcctcactcaagattaagacattttttgaaaagcagtagagtttgcttaaaatacaaattaattattcttgactataaccttgtaaaggtaaatctaatgtataaatttttgaaaaattttgcaccactggtcatagcatctatctcctttgccttaatttactgaaatacatcattttattcggttcaattgaaataaagctatgtctttactatgtattggccctaccaaaatcatatattaaaattttctaacat

SEQ ID NO: 2187 - protein, 699 aa, Homo sapien
MKIAVLFCFFLLIIFQTDFGKNEEIPRKQRRKIYHRRLRKSSTSHKHRSNRQLGIQQTTVFTPVARLPIVNFDYSMEEKFESFSSFPGVESSYNVLPGKKGHCLVKGITMYNKAVWSPEPCTTCLCSDGRVLCDETMCHPQRCPQTVIPEGECCPVCSATVSYSLLSGIALNDRNEFSGDSSEQREPTNLLHKQLPPPQVGMDRIVRKEALQSEEDEEVKEEDTEQKRETPESRNQGQLYSEGDSRGGDRKQRPGEERRLAHQQQRQGREEEEDEEEEGEEGEEDEEDEEDPVRGDMFRMPSRSPLPAPPRGTLRLPSGCSLSYRTISCINAMLTQIPPLTAPQITSLELTGNSIASIPDEAFNGLPNLERLDLSKNNITSSGIGPKAFKLLKKLMRLNMDGNNLIQIPSQLPSTLEELKVNENNLQAIDEESLSDLNQLVTLELEGNNLSEANVNPLAFKPLKSLAYLRLGKNKFRIIPQGLPGSIEELYLENNQIEEITEICFNHTRKINVIVLRYNKIEENRIAPLAWINQENLESIDLSYNKLYHVPSYLPKSLLHLVLLGNQIERIPGYVFGHMEPGLEYLYLSFNKLADDGMDRVSFYGAYHSLRELFLDHNDLKSIPPGIQEMKALHFLRLNNNKIRNILPEEICNAEEDDDSNLEHLHLENNYIKIREIPSYTFSCIRSYSSIVLKPQNIK

SEQ ID NO: 2188 - DNA, 1103 bp, Homo sapien
cacagagcccgggccgcaggcacctcctcgccagctcttccgctcctctcacagccgccagacccgcctgctgagccccatggcccgcgctgctctctccgccgcccccagcaatccccggctcctgcgagtggcactgctgctcctgctcctggtagccgctggccggcgcgcagcaggagcgtccgtggccactgaactgcgctgccagtgcttgcagaccctgcagggaattcaccccaagaacatccaaagtgtgaacgtgaagtcccccggaccccactgcgcccaaaccgaagtcatagccacactcaagaatgggcggaaagcttgcctcaatcctgcatcccccatagttaagaaaatcatcgaaaagatgctgaacagtgacaaatccaactgaccagaagggaggaggaagctcactggtggctgttcctgaaggaggccctgcccttataggaacagaagaggaaagagagacacagctgcagaggccacctggattgtgcctaatgtgtttgagcatcgcttaggagaagtcttctatttatttatttattcattagttttgaagattctatgttaatattttaggtgtaaaataattaagggtatgattaactctacctgcacactgtcctattatattcattctttttgaaatgtcaaccccaagttagttcaatctggattcatatttaatttgaaggtagaatgttttcaaatgttctccagtcattatgttaatatttctgaggagcctgcaacatgccagccactgtgatagaggctggcggatccaagcaaatggccaatgagatcattgtgaaggcaggggaatgtatgtgcacatctgttttgtaactgtttagatgaatgtcagttgttatttattgaaatgatttcacagtgtgtggtcaacatttctcatgttgaaactttaagaactaaaatgttctaaatatcccttggacattttatgtctttcttgtaaggcatactgccttgtttaatggtagttttacagtgtttctggcttagaacaaaggggcttaattattgatgttttcatagagaatataaaaataaagcacttatag

SEQ ID NO: 2189 - protein, 107 aa, Homo sapien
MARAALSAAPSNPRLLRVALLLLLLVAAGRRAAGASVATELRCQCLQTLQGIHPKNIQSVNVKSPGPHCAQTEVIATLKNGRKACLNPASPIVKKIIEKMLNSDKSN

SEQ ID NO: 2190 - DNA, 2477 bp, Homo sapien
aggggaagggaatgtgaccaggtctaggtctggagtttcagcttggacactgagccaagcagacaagcaaagcaagccaggacacaccatcctgccccaggcccagcttctctcctgccttccaacgccatggggagcaatctcagcccccaactctgcctgatgccctttatcttgggcctcttgtctggaggtgtgaccaccactccatggtctttggcccagccccagggatcctgctctctggagggggtagagatcaaaggcggctccttccgacttctccaagagggccaggcactggagtacgtgtgtccttctggcttctacccgtaccctgtgcagacacgtacctgcagatctacggggtcctggagcaccctgaagactcaagaccaaaagactgtcaggaaggcagagtgcagagcaatccactgtccaagaccacacgacttcgagaacggggaatactggccccggtctccctactacaatgtgagtgatgagatctctttccactgctatgacggttacactctccggggctctgccaatcgcacctgccaagtgaatggccggtggagtgggcagacagcgatctgtgacaacggagcggggtactgctccaacccgggcatccccattggcacaaggaaggtgggcagccagtaccgccttgaagacagcgtcacctaccactgcagccgggggcttaccctgcgtggctcccagcggcgaacgtgtcaggaaggtggctcttggagcgggacggagccttcctgccaagactccttcatgtacgacacccctcaagaggtggccgaagctttcctgtcttccctgacagagaccatagaaggagtcgatgctgaggatgggcacggcccaggggaacaacagaagcggaagatcgtcctggacccttcaggctccatgaacatctacctggtgctagatggatcagacagcattggggccagcaacttcacaggagccaaaaagtgtctagtcaacttaattgagaaggtggcaagttatggtgtgaagccaagatatggtctagtgacatatgccacataccccaaaatttgggtcaaagtgtctgaagcagacagcagtaatgcagactgggtcacgaagcagctcaatgaaatcaattatgaagaccacaagttgaagtcagggactaacaccaagaaggccctccaggcagtgtacagcatgatgagctggccagatgacgtccctcctgaaggctggaaccgcacccgccatgtcatcatcctcatgactgatggattgcacaacatgggcggggacccaattactgtcattgatgagatccgggacttgctatacattggcaaggatcgcaaaaacccaagggaggattatctggatgtctatgtgtttggggtcgggcctttggtgaaccaagtgaacatcaatgctttggcttccaagaaagacaatgagcaacatgtgttcaaagtcaaggatatggaaaacctggaagatgttttctaccaaatgatcgatgaaagccagtctctgagtctctgtggcatggtttgggaacacaggaagggtaccgattaccacaagcaaccatggcaggccaagatctcagtcattcgcccttcaaagggacacgagagctgtatgggggctgtggtgtctgagtactttgtgctgacagcagcacattgtttcactgtggatgacaaggaacactcaatcaaggtcagcgtaggaggggagaagcgggacctggagatagaagtagtcctatttcaccccaactacaacattaatgggaaaaaagaagcaggaattcctgaattttatgactatgacgttgccctgatcaagctcaagaataagctgaaatatggccagactatcaggcccatttgtctcccctgcaccgagggaacaactcgagctttgaggcttcctccaactaccacttgccagcaacaaaaggaagagctgctccctgcacaggatatcaaagctctgtttgtgtctgaggaggagaaaaagctgactcggaaggaggtctacatcaagaatggggataagaaaggcagctgtgagagagatgctcaatatgccccaggctatgacaaagtcaaggacatctcagaggtggtcacccctcggttcctttgtactggaggagtgagtccctatgctgaccccaatacttgcagaggtgattctggcggccccttgatagttcacaagagaagtcgtttcattcaagttggtgtaatcagctggggagtagtggatgtctgcaaaaaccagaagcggcaaaagcaggtacctgctcacgcccgagactttcacatcaacctctttcaagtgctgccctggctgaaggagaaactccaagatgaggatttgggttttctataaggggtttcctgctggacaggggcgtgggattgaattaaaacagctgcgacaac

SEQ ID NO: 2191 - protein, 764 aa, Homo sapien
MGSNLSPQLCLMPFILGLLSGGVTTTPWSLAQPQGSCSLEGVEIKGGSFRLLQEGQALEYVCPSGFYPYPVQTRTCRSTGSWSTLKTQDQKTVRKAECRAIHCPRPHDFENGEYWPRSPYYNVSDEISFHCYDGYTLRGSANRTCQVNGRWSGQTAICDNGAGYCSNPGIPIGTRKVGSQYRLEDSVTYHCSRGLTLRGSQRRTCQEGGSWSGTEPSCQDSFMYDTPQEVAEAFLSSLTETIEGVDAEDGHGPGEQQKRKIVLDPSGSMNIYLVLDGSDSIGASNFTGAKKCLVNLIEKVASYGVKPRYGLVTYATYPKIWVKVSEADSSNADWVTKQLNEINYEDHKLKSGTNTKKALQAVYSMMSWPDDVPPEGWNRTRHVIILMTDGLHNMGGDPITVIDEIRDLLYIGKDRKNPREDYLDVYVFGVGPLVNQVNINALASKKDNEQHVFKVKDMENLEDVFYQMIDESQSLSLCGMVWEHRKGTDYHKQPWQAKISVIRPSKGHESCMGAVVSEYFVLTAAHCFTVDDKEHSIKVSVGGEKRDLEIEVVLFHPNYNINGKKEAGIPEFYDYDVALIKLKNKLKYGQTIRPICLPCTEGTTRALRLPPTTTCQQQKEELLPAQDIKALFVSEEEKKLTRKEVYIKNGDKKGSCERDAQYAPGYDKVKDISEVVTPRFLCTGGVSPYADPNTCRGDSGGPLIVHKRSRFIQVGVISWGVVDVCKNQKRQKQVPAHARDFHINLFQVLPWLKEKLQDEDLGFL

SEQ ID NO: 2192 - DNA, 1676 bp, Homo sapien
gaattccgccgctgaccgaggcgtgcaaagactccagaattggaggcatgatgaagactctgctgctgtttgtggggctgctgctgacctgggagagtgggcaggtcctgggggaccagacggtctcagacaatgagctccaggaaatgtccaatcagggaagtaagtacgtcaataaggaaattcaaaatgctgtcaacggggtgaaacagataaagactctcatagaaaaaacaaacgaagagcgcaagacactgctcagcaacctagaagaagccaagaagaagaaagaggatgccctaaatgagaccagggaatcagagacaaagctgaaggagctcccaggagtgtgcaatgagaccatgatggccctctgggaagagtgtaagccctgcctgaaacagacctgcatgaagttctacgcacgcgtctgcagaagtggctcaggcctggttggccgccagcttgaggagttcctgaaccagagctcgcccttctacttctggatgaatggtgaccgcatcgactccctgctggagaacgaccggcagcagacgcacatgctggatgtcatgcaggaccacttcagccgcgcgtccagcatcatagacgagctcttccaggacaggttcttcacccgggagccccaggatacctaccactacctgcccttcagcctgccccaccggaggcctcacttcttctttcccaagtcccgcatcgtccgcagcttgatgcccttctctccgtacgagcccctgaacttccacgccatgttccagcccttccttgagatgatacacgaggctcagcaggccatggacatccacttccacagcccggccttccagcacccgccaacagaattcatacgagaaggcgacgatgaccggactgtgtgccgggagatccgccacaactccacgggctgcctgcggatgaaggaccagtgtgacaagtgccgggagatcttgtctgtggactgttccaccaacaacccctcccaggctaagctgcggcgggagctcgacgaatccctccaggtcgctgagaggttgaccaggaaatacaacgagctgctaaagtcctaccagtggaagatgctcaacacctcctccttgctggagcagctgaacgagcagtttaactgggtgtcccggctggcaaacctcacgcaaggcgaagaccagtactatctgcgggtcaccacggtggcttcccacacttctgactcggacgttccttccggtgtcactgaggtggtcgtgaagctctttgactctgatcccatcactgtgacggtccctgtagaagtctccaggaagaaccctaaatttatggagaccgtggcggagaaagcgctgcaggaataccgcaaaaagcaccgggaggagtgagatgtggatgttgcttttgcaccttacgggggcatcttgagtccagctccccccaagatgagctgcagccccccagagagagctctgcacgtcaccaagtaaccaggccccagcctccaggcccccaactccgcccagcctctccccgctctggatcctgcactctaacactcgactctgctgctcatgggaagaacagaattgctcctgcatgcaactaattcaataaaactgtcttgtgagctgaaaaaaaaaaaaaaaaaaaaaaaaaaggaattc

SEQ ID NO: 2193 - protein, 449 aa, Homo sapien
MMKTLLLFVGLLLTWESGQVLGDQTVSDNELQEMSNQGSKYVNKEIQNAVNGVKQIKTLIEKTNEERKTLLSNLEEAKKKKEDALNETRESETKLKELPGVCNETMMALWEECKPCLKQTCMKFYARVCRSGSGLVGRQLEEFLNQSSPFYFWMNGDRIDSLLENDRQQTHMLDVMQDHFSRASSIIDELFQDRFFTREPQDTYHYLPFSLPHRRPHFFFPKSRIVRSLMPFSPYEPLNFHAMFQPFLEMIHEAQQAMDIHFHSPAFQHPPTEFIREGDDDRTVCREIRHNSTGCLRMKDQCDKCREILSVDCSTNNPSQAKLRRELDESLQVAERLTRKYNELLKSYQWKMLNTSSLLEQLNEQFNWVSRLANLTQGEDQYYLRVTTVASHTSDSDVPSGVTEVVVKLFDSDPITVTVPVEVSRKNPKFMETVAEKALQEYRKKHREE

SEQ ID NO: 2194 - DNA, 691 bp, Homo sapien
gacccctcacactcacctagccaccatggacatcgccatccaccacccctggatccgccgccccttctttcctttccactcccccagccgcctctttgaccagttcttcggagagcacctgttggagtctgatcttttcccgacgtctacttccctgagtcccttctaccttcggccaccctccttcctgcgggcacccagctggtttgacactggactctcagagatgcgcctggagaaggacaggttctctgtcaacctggatgtgaagcacttctccccagaggaactcaaagttaaggtgttgggagatgtgattgaggtgcatggaaaacatgaagagcgccaggatgaacatggtttcatctccagggagttccacaggaaataccggatcccagctgatgtagaccctctcaccattacttcatccctgtcatctgatggggtcctcactgtgaatggaccaaggaaacaggtctctggccctgagcgcaccattcccatcacccgtgaagagaagcctgctgtcaccgcagcccccaagaaatagatgccctttcttgaattgcattttttaaaacaagaaagtttccccaccagtgaatgaaagtcttgtgactagtgctgaagcttattaatgctaagggcaggcccaaattatcaagctaataaaatatcattcagcaac

SEQ ID NO: 2195 - protein, 175 aa, Homo sapien
MDIAIHHPWIRRPFFPFHSPSRLFDQFFGEHLLESDLFPTSTSLSPFYLRPPSFLRAPSWFDTGLSEMRLEKDRFSVNLDVKHFSPEELKVKVLGDVIEVHGKHEERQDEHGFISREFHRKYRIPADVDPLTITSSLSSDGVLTVNGPRKQVSGPERTIPITREEKPAVTAAPKK

SEQ ID NO: 2196 - DNA, 7560 bp, Homo sapien
accggccacagcctgcctactgtcacccgcctctcccgcgcgcagatacacgcccccgcctccgtgggcacaaaggcagcgctgctggggaactcgggggaacgcgcacgtgggaaccgccgcagctccacactccaggtacttcttccaaggacctaggtctctcgcccatcggaaagaaaataattctttcaagaagatcagggacaactgatttgaagtctactctgtgcttctaaatccccaattctgctgaaagtgaatccctagagccctagagccccagcagcacccagccaaacccacctccaccatgggggccatgactcagctgttggcaggtgtctttcttgctttccttgccctcgctaccgaaggtggggtcctcaagaaagtcatccggcacaagcgacagagtggggtgaacgccaccctgccagaagagaaccagccagtggtgtttaaccacgtttacaacatcaagctgccagtgggatcccagtgttcggtggatctggagtcagccagtggggagaaagacctggcaccgccttcagagcccagcgaaagctttcaggagcacacagtagatggggaaaaccagattgtcttcacacatcgcatcaacatcccccgccgggcctgtggctgtgccgcagcccctgatgttaaggagctgctgagcagactggaggagctggagaacctggtgtcttccctgagggagcaatgtactgcaggagcaggctgctgtctccagcctgccacaggccgcttggacaccaggcccttctgtagcggtcggggcaacttcagcactgaaggatgtggctgtgtctgcgaacctggctggaaaggccccaactgctctgagcccgaatgtccaggcaactgtcaccttcgaggccggtgcattgatgggcagtgcatctgtgacgacggcttcacgggcgaggactgcagccagctggcttgccccagcgactgcaatgaccagggcaagtgcgtgaatggagtctgcatctgtttcgaaggctacgccggggctgactgcagccgtgaaatctgcccagtgccctgcagtgaggagcacggcacatgtgtagatggcttgtgtgtgtgccacgatggctttgcaggcgatgactgcaacaagcctctgtgtctcaacaattgctacaaccgtggacgatgcgtggagaatgagtgcgtgtgtgatgagggtttcacgggcgaagactgcagtgagctcatctgccccaatgactgcttcgaccggggccgctgcatcaatggcacctgctactgcgaagaaggcttcacaggtgaagactgcgggaaacccacctgcccacatgcctgccacacccagggccggtgtgaggaggggcagtgtgtatgtgatgagggctttgccggtttggactgcagcgagaagaggtgtcctgctgactgtcacaatcgtggccgctgtgtagacgggcggtgtgagtgtgatgatggtttcactggagctgactgtggggagctcaagtgtcccaatggctgcagtggccatggccgctgtgtcaatgggcagtgtgtgtgtgatgagggctatactggggaggactgcagccagctacggtgccccaatgactgtcacagtcggggccgctgtgtcgagggcaaatgtgtatgtgagcaaggcttcaagggctatgactgcagtgacatgagctgccctaatgactgtcaccagcacggccgctgtgtgaatggcatgtgtgtttgtgatgacggctacacaggggaagactgccgggatcgccaatgccccagggactgcagcaacaggggcctctgtgtggacggacagtgcgtctgtgaggacggcttcaccggccctgactgtgcagaactctcctgtccaaatgactgccatggccagggtcgctgtgtgaatgggcagtgcgtgtgccatgaaggatttatgggcaaagactgcaaggagcaaagatgtcccagtgactgtcatggccagggccgctgcgtggacggccagtgcatctgccacgagggcttcacaggcctggactgtggccagcactcctgccccagtgactgcaacaacttaggacaatgcgtctcgggccgctgcatctgcaacgagggctacagcggagaagactgctcagaggtgtctcctcccaaagacctcgttgtgacagaagtgacggaagagacggtcaacctggcctgggacaatgagatgcgggtcacagagtaccttgtcgtgtacacgcccacccacgagggtggtctggaaatgcagttccgtgtgcctggggaccagacgtccaccatcatccaggagctggagcctggtgtggagtactttatccgtgtatttgccatcctggagaacaagaagagcattcctgtcagcgccagggtggccacgtacttacctgcacctgaaggcctgaaattcaagtccatcaaggagacatctgtggaagtggagtgggatcctctagacattgcttttgaaacctgggagatcatcttccggaatatgaataaagaagatgagggagagatcaccaaaagcctgaggaggccagagacctcttaccggcaaactggtctagctcctgggcaagagtatgagatatctctgcacatagtgaaaaacaatacccggggccctggcctgaagagggtgaccaccacacgcttggatgcccccagccagatcgaggtgaaagatgtcacagacaccactgccttgatcacctggttcaagcccctggctgagatcgatggcattgagctgacctacggcatcaaagacgtgccaggagaccgtaccaccatcgatctcacagaggacgagaaccagtactccatcgggaacctgaagcctgacactgagtacgaggtgtccctcatctcccgcagaggtgacatgtcaagcaacccagccaaagagaccttcacaacaggcctcgatgctcccaggaatcttcgacgtgtttcccagacagataacagcatcaccctggaatggaggaatggcaaggcagctattgacagttacagaattaagtatgcccccatctctggaggggaccacgctgaggttgatgttccaaagagccaacaagccacaaccaaaaccacactcacaggtctgaggccgggaactgaatatgggattggagtttctgctgtgaaggaagacaaggagagcaatccagcgaccatcaacgcagccacagagttggacacgcccaaggaccttcaggtttctgaaactgcagagaccagcctgaccctgctctggaagacaccgttggccaaatttgaccgctaccgcctcaattacagtctccccacaggccagtgggtgggagtgcagcttccaagaaacaccacttcctatgtcctgagaggcctggaaccaggacaggagtacaatgtcctcctgacagccgagaaaggcagacacaagagcaagcccgcacgtgtgaaggcatccactgaacaagcccctgagctggaaaacctcaccgtgactgaggttggctgggatggcctcagactcaactggaccgcggctgaccaggcctatgagcactttatcattcaggtgcaggaggccaacaaggtggaggcagctcggaacctcaccgtgcctggcagccttcgggctgtggacataccgggcctcaaggctgctacgccttatacagtctccatctatggggtgatccagggctatagaacaccagtgctctctgctgaggcctccacaggggaaactcccaatttgggagaggtcgtggtggccgaggtgggctgggatgccctcaaactcaactggactgctccagaaggggcctatgagtactttttcattcaggtgcaggaggctgacacagtagaggcagcccagaacctcaccgtcccaggaggactgaggtccacagacctgcctgggctcaaagcagccactcattataccatcaccatccgcggggtcactcaggacttcagcacaacccctctctctgttgaagtcttgacagaggaggttccagatatgggaaacctcacagtgaccgaggttagctgggatgctctcagactgaactggaccacgccagatggaacctatgaccagtttactattcaggtccaggaggctgaccaggtggaagaggctcacaatctcacggttcctggcagcctgcgttccatggaaatcccaggcctcagggctggcactccttacacagtcaccctgcacggcgaggtcaggggccacagcactcgaccccttgctgtagaggtcgtcacagaggatctcccacagctgggagatttagccgtgtctgaggttggctgggatggcctcagactcaactggaccgcagctgacaatgcctatgagcactttgtcattcaggtgcaggaggtcaacaaagtggaggcagcccagaacctcacgttgcctggcagcctcagggctgtggacatcccgggcctcgaggctgccacgccttatagagtctccatctatggggtgatccggggctatagaacaccagtactctctgctgaggcctccacagccaaagaacctgaaattggaaacttaaatgtttctgacataactcccgagagcttcaatctctcctggatggctaccgatgggatcttcgagacctttaccattgaaattattgattccaataggttgctggagactgtggaatataatatctctggtgctgaacgaactgcccatatctcagggctaccccctagtactgattttattgtctacctctctggacttgctcccagcatccggaccaaaaccatcagtgccacagccacgacagaggccctgccccttctggaaaacctaaccatttccgacattaatccctacgggttcacagtttcctggatggcatcggagaatgcctttgacagctttctagtaacggtggtggattctgggaagctgctggacccccaggaattcacactttcaggaacccagaggaagctggagcttagaggcctcataactggcattggctatgaggttatggtctctggcttcacccaagggcatcaaaccaagcccttgagggctgagattgttacagaagccgaaccggaagttgacaaccttctggtttcagatgccaccccagacggtttccgtctgtcctggacagctgatgaaggggtcttcgacaattttgttctcaaaatcagagataccaaaaagcagtctgagccactggaaataaccctacttgcccccgaacgtaccagggacttaacaggtctcagagaggctactgaatacgaaattgaactctatggaataagcaaaggaaggcgatcccagacagtcagtgctatagcaacaacagccatgggctccccaaaggaagtcattttctcagacatcactgaaaattcggctactgtcagctggagggcacccacggcccaagtggagagcttccggattacctatgtgcccattacaggaggtacaccctccatggtaactgtggacggaaccaagactcagaccaggctggtgaaactcatacctggcgtggagtaccttgtcagcatcatcgccatgaagggctttgaggaaagtgaacctgtctcagggtcattcaccacagctctggatggcccatctggcctggtgacagccaacatcactgactcagaagccttggccaggtggcagccagccattgccactgtggacagttatgtcatctcctacacaggcgagaaagtgccagaaattacacgcacggtgtccgggaacacagtggagtatgctctgaccgacctcgagcctgccacggaatacacactgagaatctttgcagagaaagggccccagaagagctcaaccatcactgccaagttcacaacagacctcgattctccaagagacttgactgctactgaggttcagtcggaaactgccctccttacctggcgacccccccgggcatcagtcaccggttacctgctggtctatgaatcagtggatggcacagtcaaggaagtcattgtgggtccagataccacctcctacagcctggcagacctgagcccatccacccactacacagccaagatccaggcactcaatgggcccctgaggagcaatatgatccagaccatcttcaccacaattggactcctgtaccccttccccaaggactgctcccaagcaatgctgaatggagacacgacctctggcctctacaccatttatctgaatggtgataaggctcaggcgctggaagtcttctgtgacatgacctctgatgggggtggatggattgtgttcctgagacgcaaaaacggacgcgagaacttctaccaaaactggaaggcatatgctgctggatttggggaccgcagagaagaattctggcttgggctggacaacctgaacaaaatcacagcccaggggcagtacgagctccgggtggacctgcgggaccatggggagacagcctttgctgtctatgacaagttcagcgtgggagatgccaagactcgctacaagctgaaggtggaggggtacagtgggacagcaggtgactccatggcctaccacaatggcagatccttctccacctttgacaaggacacagattcagccatcaccaactgtgctctgtcctacaaaggggctttctggtacaggaactgtcaccgtgtcaacctgatggggagatatggggacaataaccacagtcagggcgttaactggttccactggaagggccacgaacactcaatccagtttgctgagatgaagctgagaccaagcaacttcagaaatcttgaaggcaggcgcaaacgggcataaattggagggaccactgggtgagagaggaataaggcggcccagagcgaggaaaggattttaccaaagcatcaatacaaccagcccaaccatcggtccacacctgggcatttggtgagaatcaaagctgaccatggatccctggggccaacggcaacagcatgggcctcacctcctctgtgatttctttctttgcaccaaagacatcagtctccaacatgtttctgttttgttgtttgattcagcaaaaatctcccagtgacaacatcgcaatagttttttacttctcttaggtggctctgggatgggagaggggtaggatgtacaggggtagtttgttttagaaccagccgtattttacatgaagctgtataattaattgtcattatttttgttagcaaagattaaatgtgtcattggaagccatccctttttttacatttcatacaacagaaaccagaaaagcaatactgtttccattttaaggatatgattaatattattaatataataatgatgatgatgatgatgaaaactaaggatttttcaagagatctttctttccaaaacatttctggacagtacctgattgtattttttttttaaataaaagcacaagtacttttgaaaaaaaaccggaattc

SEQ ID NO: 2197 - protein, 2000 aa, Homo sapien
MGAMTQLLAGVFLAFLALATEGGVLKKVIRHKRQSGVNATLPEENQPVVFNHVYNIKLPVGSQCSVDLESASGEKDLAPPSEPSESFQEHTVDGENQIVFTHRINIPRRACGCAAAPDVKELLSRLEELENLVSSLREQCTAGAGCCLQPATGRLDTRPFCSGRGNFSTEGCGCVCEPGWKGPNCSEPECPGNCHLRGRCIDGQCICDDGFTGEDCSQLACPSDCNDQGKCVNGVCICFEGYAGADCSREICPVPCSEEHGTCVDGLCVCHDGFAGDDCNKPLCLNNCYNRGRCVENECVCDEGFTGEDCSELICPNDCFDRGRCINGTCYCEEGFTGEDCGKPTCPHACHTQGRCEEGQCVCDEGFAGLDCSEKRCPADCHNRGRCVDGRCECDDGFTGADCGELKCPNGCSGHGRCVNGQCVCDEGYTGEDCSQLRCPNDCHSRGRCVEGKCVCEQGFKGYDCSDMSCPNDCHQHGRCVNGMCVCDDGYTGEDCRDRQCPRDCSNRGLCVDGQCVCEDGFTGPDCAELSCPNDCHGQGRCVNGQCVCHEGFMGKDCKEQRCPSDCHGQGRCVDGQCICHEGFTGLDCGQHSCPSDCNNLGQCVSGRCICNEGYSGEDCSEVSPPKDLVVTEVTEETVNLAWDNEMRVTEYLVVYTPTHEGGLEMQFRVPGDQTSTIIQELEPGVEYFIRVFAILENKKSIPVSARVATYLPAPEGLKFKSIKETSVEVEWDPLDIAFETWEIIFRNMNKEDEGEITKSLRRPETSYRQTGLAPGQEYEISLHIVKNNTRGPGLKRVTTTRLDAPSQIEVKDVTDTTALITWFKPLAEIDGIELTYGIKDVPGDRTTIDLTEDENQYSIGNLKPDTEYEVSLISRRGDMSSNPAKETFTTGLDAPRNLRRVSQTDNSITLEWRNGKAAIDSYRIKYAPISGGDHAEVDVPKSQQATTKTTLTGLRPGTEYGIGVSAVKEDKESNPATINAATELDTPKDLQVSETAETSLTLLWKTPLAKFDRYRLNYSLPTGQWVGVQLPRNTTSYVLRGLEPGQEYNVLLTAEKGRHKSKPARVKASTEQAPELENLTVTEVGWDGLRLNWTAADQAYEHFIIQVQEANKVEAARNLTVPGSLRAVDIPGLKAATPYTVSIYGVIQGYRTPVLSAEASTGETPNLGEVVVAEVGWDALKLNWTAPEGAYEYFFIQVQEADTVEAAQNLTVPGGLRSTDLPGLKAATHYTITIRGVTQDFSTTPLSVEVLTEEVPDMGNLTVTEVSWDALRLNWTTPDGTYDQFTIQVQEADQVEEAHNLTVPGSLRSMEIPGLRAGTPYTVTLHGEVRGHSTRPLAVEVVTEDLPQLGDLAVSEVGWDGLRLNWTAADNAYEHFVIQVQEVNKVEAAQNLTLPGSLRAVDIPGLEAATPYRVSIYGVIRGYRTPVLSAEASTAKEPEIGNLNVSDITPESFNLSWMATDGIFETFTIEIIDSNRLLETVEYNISGAERTAHISGLPPSTDFIVYLSGLAPSIRTKTISATATTEALPLLENLTISDINPYGFTVSWMASENAFDSFLVTVVDSGKLLDPQEFTLSGTQRKLELRGLITGIGYEVMVSGFTQGHQTKPLRAEIVTEAEPEVDNLLVSDATPDGFRLSWTADEGVFDNFVLKIRDTKKQSEPLEITLLAPERTRDLTGLREATEYEIELYGISKGRRSQTVSAIATTAMGSPKEVIFSDITENSATVSWRAPTAQVESFRITYVPITGGTPSMVTVDGTKTQTRLVKLIPGVEYLVSIIAMKGFEESEPVSGSFTTALDGPSGLVTANITDSEALARWQPAIATVDSYVISYTGEKVPEITRTVSGNTVEYALTDLEPATEYTLRIFAEKGPQKSSTITAKFTTDLDSPRDLTATEVQSETALLTWRPPRASVTGYLLVYESVDGTVKEVIVGPDTTSYSLADLSPSTHYTAKIQALNGPLRSNMIQTIFTTIGLLYPFPKDCSQAMLNGDTTSGLYTI

SEQ ID NO: 2198 - DNA, 738 bp, Homo sapien
aaagcagaattgagagtttgttcttacacacaagtttaatgccaccttcctctgtctgccatggaccaacaagcaatatatgctgagttaaacttacccacagactcaggcccagaaagttcttcaccttcatctcttcctcgggatgtctgtcagggttcaccttggcatcaatttgccctgaaacttagctgtgctgggattattctccttgtcttggttgttactgggttgagtgtttcagtgacatccttaatacagaaatcatcaatagaaaaatgcagtgtggacattcaacagagcaggaataaaacaacagagagaccgggtctcttaaactgcccaatatattggcagcaactccgagagaaatgcttgttattttctcacactgtcaacccttggaataacagtctagctgattgttccaccaaagaatccagcctgctgcttattcgagataaggatgaattgatacacacacagaacctgatacgtgacaaagcaattctgttttggattggattaaatttttcattatcagaaaagaactggaagtggataaacggctcttttttaaattctaatgacttagaaattagaggtgatgctaaagaaaacagctgtatttccatctcacagacatctgtgtattctgagtactgtagtacagaaatcagatggatctgccaaaaagaactaacacctgtgagaaataaagtgtatcctgactcttga

SEQ ID NO: 2199 - protein, 225 aa, Homo sapien
MDQQAIYAELNLPTDSGPESSSPSSLPRDVCQGSPWHQFALKLSCAGIILLVLVVTGLSVSVTSLIQKSSIEKCSVDIQQSRNKTTERPGLLNCPIYWQQLREKCLLFSHTVNPWNNSLADCSTKESSLLLIRDKDELIHTQNLIRDKAILFWIGLNFSLSEKNWKWINGSFLNSNDLEIRGDAKENSCISISQTSVYSEYCSTEIRWICQKELTPVRNKVYPDS

SEQ ID NO: 2200 - DNA, 2619 bp, Homo sapien
gactcctaggggcttgcagacctagtgggagagaaagaacatcgcagcagccaggcagaaccaggacaggtgaggtgcaggctggctttcctctcgcagcgcggtgtggagtcctgtcctgcctcagggcttttcggagcctggatcctcaaggaacaagtagacctggccgcggggagtggggagggaaggggtgtctattgggcaacagggcggcaaagccctgaataaaggggcgcagggcaggcgcaagtgcagagccttcgtttgccaagtcgcctccagaccgcagacatgaaacttgtcttcctcgtcctgctgttcctcggggccctcggactgtgtctggctggccgtaggagaaggagtgttcagtggtgcgccgtatcccaacccgaggccacaaaatgcttccaatggcaaaggaatatgagaaaagtgcgtggccctcctgtcagctgcataaagagagactcccccatccagtgtatccaggccattgcggaaaacagggccgatgctgtgacccttgatggtggtttcatatacgaggcaggcctggccccctacaaactgcgacctgtagcggcggaagtctacgggaccgaaagacagccacgaactcactattatgccgtggctgtggtgaagaagggcggcagctttcagctgaacgaactgcaaggtctgaagtcctgccacacaggccttcgcaggaccgctggatggaatgtccctacagggacacttcgtccattcttgaattggacgggtccacctgagcccattgaggcagctgtggccaggttcttctcagccagctgtgttcccggtgcagataaaggacagttccccaacctgtgtcgcctgtgtgcggggacaggggaaaacaaatgtgccttctcctcccaggaaccgtacttcagctactctggtgccttcaagtgtctgagagacggggctggagacgtggcttttatcagagagagcacagtgtttgaggacctgtcagacgaggctgaaagggacgagtatgagttactctgcccagacaacactcggaagccagtggacaagttcaaagactgccatctggcccgggtcccttctcatgccgttgtggcacgaagtgtgaatggcaaggaggatgccatctggaatcttctccgccaggcacaggaaaagtttggaaaggacaagtcaccgaaattccagctctttggctcccctagtgggcagaaagatctgctgttcaaggactctgccattgggttttcgagggtgcccccgaggatagattctgggctgtaccttggctccggctacttcactgccatccagaacttgaggaaaagtgaggaggaagtggctgcccggcgtgcgcgggtcgtgtggtgtgcggtgggcgagcaggagctgcgcaagtgtaaccagtggagtggcttgagcgaaggcagcgtgacctgctcctcggcctccaccacagaggactgcatcgccctggtgctgaaaggagaagctgatgccatgagtttggatggaggatatgtgtacactgcatgcaaatgtggtttggtgcctgtcctggcagagaactacaaatcccaacaaagcagtgaccctgatcctaactgtgtggatagacctgtggaaggatatcttgctgtggcggtggttaggagatcagacactagccttacctggaactctgtgaaaggcaagaagtcctgccacaccgccgtggacaggactgcaggctggaatatccccatgggcctgctcttcaaccagacgggctcctgcaaatttgatgaatatttcagtcaaagctgtgcccctgggtctgacccgagatctaatctctgtgctctgtgtattggcgacgagcagggtgagaataagtgcgtgcccaacagcaacgagagatactacggctacactggggctttccggtgcctggctgagaatgctggagacgttgcatttgtgaaagatgtcactgtcttgcagaacactgatggaaataacaatgaggcatgggctaaggatttgaagctggcagactttgcgctgctgtgcctcgatggcaaacggaagcctgtgactgaggctagaagctgccatcttgccatggccccgaatcatgccgtggtgtctcggatggataaggtggaacgcctgaaacaggtgctgctccaccaacaggctaaatttgggagaaatggatctgactgcccggacaagttttgcttattccagtctgaaaccaaaaaccttctgttcaatgacaacactgagtgtctggccagactccatggcaaaacaacatatgaaaaatatttgggaccacagtatgtcgcaggcattactaatctgaaaaagtgctcaacctcccccctcctggaagcctgtgaattcctcaggaagtaaaaccgaagaagatggcccagctccccaagaaagcctcagccattcactgcccccagctcttctccccaggtgtgttggggccttggctcccctgctgaaggtggggattgcccatccatctgcttacaattccctgctgtcgtcttagcaagaagtaaaatgagaaattttgttgatattcaaaaaaaa

SEQ ID NO: 2201 - protein, 711 aa, Homo sapien
MKLVFLVLLFLGALGLCLAGRRRRSVQWCAVSQPEATKCFQWQRNMRKVRGPPVSCIKRDSPIQCIQAIAENRADAVTLDGGFIYEAGLAPYKLRPVAAEVYGTERQPRTHYYAVAVVKKGGSFQLNELQGLKSCHTGLRRTAGWNVPTGTLRPFLNWTGPPEPIEAAVARFFSASCVPGADKGQFPNLCRLCAGTGENKCAFSSQEPYFSYSGAFKCLRDGAGDVAFIRESTVFEDLSDEAERDEYELLCPDNTRKPVDKFKDCHLARVPSHAVVARSVNGKEDAIWNLLRQAQEKFGKDKSPKFQLFGSPSGQKDLLFKDSAIGFSRVPPRIDSGLYLGSGYFTAIQNLRKSEEEVAARRARVVWCAVGEQELRKCNQWSGLSEGSVTCSSASTTEDCIALVLKGEADAMSLDGGYVYTACKCGLVPVLAENYKSQQSSDPDPNCVDRPVEGYLAVAVVRRSDTSLTWNSVKGKKSCHTAVDRTAGWNIPMGLLFNQTGSCKFDEYFSQSCAPGSDPRSNLCALCIGDEQGENKCVPNSNERYYGYTGAFRCLAENAGDVAFVKDVTVLQNTDGNNNEAWAKDLKLADFALLCLDGKRKPVTEARSCHLAMAPNHAVVSRMDKVERLKQVLLHQQAKFGRNGSDCPDKFCLFQSETKNLLFNDNTECLARLHGKTTYEKYLGPQYVAGITNLKKCSTSPLLEACEFLRK

SEQ ID NO: 2202 - DNA, 1778 bp, Homo sapien
tagaagtttacaatgaagtttcttctaatactgctcctgcaggccactgcttctggagctcttcccctgaacagctctacaagcctggaaaaaaataatgtgctatttggtgagagatacttagaaaaattttatggccttgagataaacaaacttccagtgacaaaaatgaaatatagtggaaacttaatgaaggaaaaaatccaagaaatgcagcacttcttgggtctgaaagtgaccgggcaactggacacatctaccctggagatgatgcacgcacctcgatgtggagtccccgatctccatcatttcagggaaatgccaggggggcccgtatggaggaaacattatatcacctacagaatcaataattacacacctgacatgaaccgtgaggatgttgactacgcaatccggaaagctttccaagtatggagtaatgttacccccttgaaattcagcaagattaacacaggcatggctgacattttggtggtttttgcccgtggagctcatggagacttccatgcttttgatggcaaaggtggaatcctagcccatgcttttggacctggatctggcattggaggggatgcacatttcgatgaggacgaattctggactacacattcaggaggcacaaacttgttcctcactgctgttcacgagattggccattccttaggtcttggccattctagtgatccaaaggctgtaatgttccccacctacaaatatgtcgacatcaacacatttcgcctctctgctgatgacatacgtggcattcagtccctgtatggagacccaaaagagaaccaacgcttgccaaatcctgacaattcagaaccagctctctgtgaccccaatttgagttttgatgctgtcactaccgtgggaaataagatctttttcttcaaagacaggttcttctggctgaaggtttctgagagaccaaagaccagtgttaatttaatttcttccttatggccaaccttgccatctggcattgaagctgcttatgaaattgaagccagaaatcaagtttttctttttaaagatgacaaatactggttaattagcaatttaagaccagagccaaattatcccaagagcatacattcttttggttttcctaactttgtgaaaaaaattgatgcagctgtttttaacccacgtttttataggacctacttctttgtagataaccagtattggaggtatgatgaaaggagacagatgatggaccctggttatcccaaactgattaccaagaacttccaaggaatcgggcctaaaattgatgcagtcttctattctaaaaacaaatactactatttcttccaaggatctaaccaatttgaatatgacttcctactccaacgtatcaccaaaacactgaaaagcaatagctggtttggttgttagaaatggtgtaattaatggtttttgttagttcacttcagcttaataagtatttattgcatatttgctatgtcctcagtgtaccactacttagagatatgtatcataaaaataaaatctgtaaaccataggtaatgattatataaaatacataatatttttcaattttgaaaactctaattgtccattcttgcttgactctactattaagtttgaaaatagttaccttcaaagcaagataattctatttgaagcatgctctgtaagttgcttcctaacatccttggactgagaaattatacttacttctggcataactaaaattaagtatatatattttggctcaaataaaattg

SEQ ID NO: 2203 - protein, 470 aa, Homo sapien
MKFLLILLLQATASGALPLNSSTSLEKNNVLFGERYLEKFYGLEINKLPVTKMKYSGNLMKEKIQEMQHFLGLKVTGQLDTSTLEMMHAPRCGVPDLHHFREMPGGPVWRKHYITYRINNYTPDMNREDVDYAIRKAFQVWSNVTPLKFSKINTGMADILVVFARGAHGDFHAFDGKGGILAHAFGPGSGIGGDAHFDEDEFWTTHSGGTNLFLTAVHEIGHSLGLGHSSDPKAVMFPTYKYVDINTFRLSADDIRGIQSLYGDPKENQRLPNPDNSEPALCDPNLSFDAVTTVGNKIFFFKDRFFWLKVSERPKTSVNLISSLWPTLPSGIEAAYEIEARNQVFLFKDDKYWLISNLRPEPNYPKSIHSFGFPNFVKKIDAAVFNPRFYRTYFFVDNQYWRYDERRQMMDPGYPKLITKNFQGIGPKIDAVFYSKNKYYYFFQGSNQFEYDFLLQRITKTLKSNSWFGC

SEQ ID NO: 2204 - DNA, 376 bp, Homo sapien
tggaattcggctttgcttatcacaatgaatgttctcctgggcagcgttgtgatctttgccaccttcgtgactttatgcaatgcatcatgctatttcatacctaatgagggagttccaggagattcaaccaggaaatgcatggatctcaaaggaaacaaacacccaataaactcggagtggcagactgacaactgtgagacatgcacttgctacgaaacagaaatttcatgttgcacccttgtttctacacctgtgggttatgacaaagacaactgccaaagaatcttcaagaaggaggactgcaagtatatcgtggtggagaagaaggacccaaaaaagacctgttctgtcagtgaatggataatctaatgtgctt

SEQ ID NO: 2205 - protein, 114 aa, Homo sapien
MNVLLGSVVIFATFVTLCNASCYFIPNEGVPGDSTRKCMDLKGNKHPINSEWQTDNCETCTCYETEISCCTLVSTPVGYDKDNCQRIFKKEDCKYIVVEKKDPKKTCSVSEWII

SEQ ID NO: 2206 - DNA, 1231 bp, Homo sapien
aggtctcagccggtcgtcgcgacgttcgcccgctcgctctgaggctcctgaagccgaaactagctagactttcctccttcccgcctgcctgtagcggcgttgttgccactccgccaccatgttcgaggcgcgcctggtccagggctccatcctcaagaaggtgttggaggcactcaaggacctcatcaacgaggcctgctgggatattagctccagcggtgtaaacctgcagagcatggactcgtcccacgtctctttggtgcagctcaccctgcggtctgagggcttcgacacctaccgctgcgaccgcaacctggccatgggcgtgaacctcaccagtatgtccaaaatactaaaatgcgccggcaatgaagatatcattacactaagggccgaagataacgcggataccttggcgctagtatttgaagcaccaaaccaggagaaagtttcagactatgaaatgaagttgatggatttagatgttgaacaacttggaattccagaacaggagtacagctgtgtagtaaagatgccttctggtgaatttgcacgtatatgccgagatctcagccatattggagatgctgttgtaatttcctgtgcaaaagacggagtgaaattttctgcaagtggagaacttggaaatggaaacattaaattgtcacagacaagtaatgtcgataaagaggaggaagctgttaccatagagatgaatgaaccagttcaactaacttttgcactgaggtacctgaacttctttacaaaagccactccactctcttcaacggtgacactcagtatgtctgcagatgtaccccttgttgtagagtataaaattgcggatatgggacacttaaaatactacttggctcccaagatcgaggatgaagaaggatcttaggcattcttaaaattcaagaaaataaaactaagctctttgagaactgcttctaagatgccagcatatactgaagtcttttctgtcaccaaatttgtacctctaagtacatatgtagatattgttttctgtaaataacctattttttttctctattctctccaatttgtttaaagaataaagtccaaagtctgatctggtctagttaacctagaagtatttttgtctcttagaaatacttgtgatttttataatacaaaagggtcttgactctaaatgcagttttaagaagtgtttttgaatttaaataaagttacttgaatttcaaac

SEQ ID NO: 2207 - protein, 261 aa, Homo sapien
MFEARLVQGSILKKVLEALKDLINEACWDISSSGVNLQSMDSSHVSLVQLTLRSEGFDTYRCDRNLAMGVNLTSMSKILKCAGNEDIITLRAEDNADTLALVFEAPNQEKVSDYEMKLMDLDVEQLGIPEQEYSCVVKMPSGEFARICRDLSHIGDAVVISCAKDGVKFSASGELGNGNIKLSQTSNVDKEEEAVTIEMNEPVQLTFALRYLNFFTKATPLSSTVTLSMSADVPLVVEYKIADMGHLKYYLAPKIEDEEGS

SEQ ID NO: 2208 - DNA, 2904 bp, Homo sapien
ggcacgagctctgtgagactgaggtggcggtcagccggagtgagtgttggggtcctggggcacctgccttacatggcttgtttatgaacattaaagggaagaagttgaagcttgaggagcgaggatggcagtcaacaaaggcctcaccttgctggatggagacctccctgagcaggagaatgtgctgcagcgggtcctgcagctgccggtggtgagtggcacctgcgaatgcttccagaagacctacaccagcactaaggaagcccaccccctggtggcctctgtgtgcaatgcctatgagaagggcgtgcagagcgccagtagcttggctgcctggagcatggagccggtggtccgcaggctgtccacccagttcacagctgccaatgagctggcctgccgaggcttggaccacctggaggaaaagatccccgccctccagtacccccctgaaaagattgcttctgagctgaaggacaccatctccacccgcctccgcagtgccagaaacagcatcagcgttcccatcgcgagcacttcagacaaggtcctgggggccgctttggccgggtgcgagcttgcctggggggtggccagagacactgcggaatttgctgccaacactcgagctggccgactggcttctggaggggccgacttggccttgggcagcattgagaaggtggtggagtacctcctccctgcagacaaggaagagtcagcccctgctcctggacaccagcaagcccagaagtctcccaaggccaagccaagcctcttgagcagggttggggctctgaccaacaccctctctcgatacaccgtgcagaccatggcccgggccctggagcagggccacaccgtggccatgtggatcccaggcgtggtgcccctgagcagcctggcccagtggggtgcctcagtggccatgcaggcggtgtcccggcggaggagcgaagtgcgggtaccctggctgcacagcctcgcagccgcccaggaggaggatcatgaggaccagacagacacggagggagaggacacggaggaggaggaagaattggagactgaggagaacaagttcagtgaggtagcagccctgccaggccctcgaggcctcctgggtggtgtggcacataccctgcagaagaccctccagaccaccatctcggctgtgacatgggcacctgcagctgtgctgggcatggcagggagggtgctgcacctcacaccagcccccgctgtctcctcaaccaaggggagggccatgtccctatcagatgccctgaagggcgttactgacaacgtggtggacacagtggtgcattacgtgccgctccccaggctgtcgctgatggagcccgagagcgaattccgggacatcgacaacccaccagccgaggtcgagcgccgggaggcggagcgcagagcgtctggggcgccgtccgccggcccggagcccgccccgcgtctcgcacagccccgccgcagcctgcgcagcgcgcagagccccggcgcgccccccggcccgggcctggaggacgaagtcgccacgcccgcagcgccgcgcccgggcttcccggccgtgccccgcgagaagccaaagcgcagggtcagcgacagcttcttccggcccagcgtcatggagcccatcgtgggccgcacgcattacagccagctgcgcaagaagagctgagtcgccgcaccagccgccgcgccccgggccggcgggtttctctaacaaataaacagaacccgcactgcccaggcgagcgttgccactttcaaagtggtcccctggggagctcagcctcatcctgatgatgctgccaaggcgcactttttatttttattttatttttattttttttttagcatccttttggggcttcactctcagagccagtttttaagggacaccagagccgcagcctgctctgattctatggcttggttgttactataagagtaattgcctaacttgatttttcatctctttaaccaaacttgtggccaaaagatatttgaccgtttccaaaattcagattctgcctctgcggataaatatttgccacgaatgagtaactcctgtcaccactctgaaggtccagacagaaggttttgacacattcttagcactgaactcctctgtgatctaggatgatctgttccccctctgatgaacatcctctgatgatcaaggctcccagcaggctactttgaagggaacaatcagatgcaaaagctcttgggtgtttatttaaaatactagtgtcactttctgagtacccgccgcttcacaggctgagtccaggcctgtgtgctttgtagagccagctgcttgctcacagccacatttccatttgcatcattactgccttcacctgcatagtcactcttttgatgctggggaaccaaaatggtgatgatatatagactttatgtatagccacagttcatccccaaccctagtcttcgaaatgttaatatttgataaatctagaaaatgcattcatacaattacagaattcaaatattgcaaaaggatgtgtgtctttctccccgagctcccctgttccccttcattgaaaaccaccacggtgccatctcttgtgtatgcagggctatgcacctgcaggcacgtgtgtatgcactccccgcttgtgtttacacaagctgtggggtgttacgcatgcctgcttttttcacttaataatacagcttggagagatttttgtatcacattataaatcccactcgctctttttgatggccacataataactactgcataatatggatacgccttatttgatttaactagttccctaatgatggacttttaagttgtttcctttttttttcttttttgctactgcaaacgatgctataataaatgtccttatc

SEQ ID NO: 2209 - protein, 522 aa, Homo sapien
MAVNKGLTLLDGDLPEQENVLQRVLQLPVVSGTCECFQKTYTSTKEAHPLVASVCNAYEKGVQSASSLAAWSMEPVVRRLSTQFTAANELACRGLDHLEEKIPALQYPPEKIASELKDTISTRLRSARNSISVPIASTSDKVLGAALAGCELAWGVARDTAEFAANTRAGRLASGGADLALGSIEKVVEYLLPADKEESAPAPGHQQAQKSPKAKPSLLSRVGALTNTLSRYTVQTMARALEQGHTVAMWIPGVVPLSSLAQWGASVAMQAVSRRRSEVRVPWLHSLAAAQEEDHEDQTDTEGEDTEEEEELETEENKFSEVAALPGPRGLLGGVAHTLQKTLQTTISAVTWAPAAVLGMAGRVLHLTPAPAVSSTKGRAMSLSDALKGVTDNVVDTVVHYVPLPRLSLMEPESEFRDIDNPPAEVERREAERRASGAPSAGPEPAPRLAQPRRSLRSAQSPGAPPGPGLEDEVATPAAPRPGFPAVPREKPKRRVSDSFFRPSVMEPIVGRTHYSQLRKKS

SEQ ID NO: 2210 - DNA, 2918 bp, Homo sapien
ggacagggcagctcaagacgctgaggtggtggctgcggcctttgaacaagtaagtgagccaccctcggagacccccgcgctggggacgggaggccggcgagcctcgggacctctgaaagccttgaggaggcgcggggacaccatggccgagcctctgaaggaggaagacggcgaggacggctctgcggagccccccgggcccgtgaaggccgaacccgcccacaccgctgcctctgtagcggccaagaacctggccctgcttaaagcccgctccttcgatgtgacctttgacgtgggcgacgagtacgagatcatcgagaccataggcaacggggcctatggagtggtgtcctccgcccgccgccgcctcaccggccagcaggtggccatcaagaagatccctaatgctttcgatgtggtgaccaatgccaagcggaccctcagggagctgaagatcctcaagcactttaaacacgacaacatcatcgccatcaaggacatcctgaggcccaccgtgccctatggcgaattcaaatctgtctacgtggtcctggacctgatggaaagcgacctgcaccagatcatccactcctcacagcccctcacactggaacacgtgcgctacttcctgtaccaactgctgcggggcctgaagtacatgcactcggctcaggtcatccaccgtgacctgaagccctccaacctattggtgaatgagaactgtgagctcaagattggtgactttggtatggctcgtggcctgtgcacctcgcccgctgaacatcagtacttcatgactgagtatgtggccacgcgctggtaccgtgcgcccgagctcatgctctctttgcatgagtatacacaggctattgacctctggtctgtgggctgcatctttggtgagatgctggcccggcgccagctcttcccaggcaaaaactatgtacaccagctacagctcatcatgatggtgctgggtaccccatcaccagccgtgattcaggctgtgggggctgagagggtgcgggcctatatccagagcttgccaccacgccagcctgtgccctgggagacagtgtacccaggtgccgaccgccaggccctatcactgctgggtcgcatgctgcgttttgagcccagcgctcgcatctcagcagctgctgcccttcgccaccctttcctggccaagtaccatgatcctgatgatgagcctgactgtgccccgccctttgactttgcctttgaccgcgaagccctcactcgggagcgcattaaggaggccattgtggctgaaattgaggacttccatgcaaggcgtgagggcatccgccaacagatccgcttccagccttctctacagcctgtggctagtgagcctggctgtccagatgttgaaatgcccagtccctgggctcccagtggggactgtgccatggagtctccaccaccagccccgccaccatgccccggccctgcacctgacaccattgatctgaccctgcagccacctccaccagtcagtgagcctgccccaccaaagaaagatggtgccatctcagacaatactaaggctgcccttaaagctgccctgctcaagtctttgaggagccggctcagagatggccccagcgcacccctggaggctcctgagcctcggaagccggtgacagcccaggagcgccagcgggagcgggaggagaagcggcggaggcggcaagaacgagccaaggagcgggagaaacggcggcaggagcgggagcgaaaggaacggggggctggggcctctgggggcccctccactgaccccttggctggactagtgctcagtgacaatgacagaagcctgttggaacgctggactcgaatggcccggcccgcagccccagccctcacctctgtgccggcccctgccccagcgccaacgccaaccccaaccccagtccaacctaccagtcctcctcctggccctgtagcccagcccactggcccgcaaccacaatctgcgggctctacctctggccctgtaccccagcctgcctgcccaccccctggccctgcaccccaccccactggccctcctgggcccatccctgtccccgcgccaccccagattgccacctccaccagcctcctggctgcccagtcacttgtgccaccccctgggctgcctggctccagcaccccaggagttttgccttacttcccacctggcctgccgcccccagacgccgggggagcccctcagtcttccatgtcagagtcacctgatgtcaaccttgtgacccagcagctatctaagtcacaggtggaggaccccctgccccctgtgttctcaggcacaccaaagggcagtggggctggctacggtgttggctttgacctggaggaattcttaaaccagtctttcgacatgggcgtggctgatgggccacaggatggccaggcagattcagcctctctctcagcctccctgcttgctgactggctcgaaggccatggcatgaaccctgccgatattgagtccctgcagcgtgagatccagatggactccccaatgctgctggctgacctgcctgacctccaggacccctgaggcccccagcctgtgccttgctgccacagtagacctagttccaggatccatgggagcattctcaaaggctttagccctggacccagcaggtgaggctcggcttggattattctgcaggttcatctcagacccacctttcagccttaagcagccacctgagccaccaccgagccatggcaggatcgggagaccccaactccccctgaacaatccttttcagtattatatttttattattattatgttattattacactgtctttttgccatcaaaatgaggcctgtgaaatacaaggttcccttctgcaaaaaaaaaaaaaaaaaa

SEQ ID NO: 2211 - protein, 815 aa, Homo sapien
MAEPLKEEDGEDGSAEPPAREGRTRPHRCLCSAKNLALLKARSFDVTFDVGDEYEIIETIGNGAYGVVSSARRRLTGQQVAIKKIPNAFDVVTNAKRTLRELKILKHFKHDNIIAIKDILRPTVPYGEFKSVYVVLDLMESDLHQIIHSSQPLTLEHVRYFLYQLLRGLKYMHSAQVIHRDLKPSNLLVNENCELKIGDFGMARGLCTSPAEHQYFMTEYVATRWYRAPELMLSLHEYTQAIDLWSVGCIFGEMLARRQLFPGKNYVHQLQLIMMVLGTPSPAVIQAVGAERVRAYIQSLPPRQPVPWETVYPGADRQALSLLGRMLRFEPSARISAAAALRHPFLAKYHDPDDEPDCAPPFDFAFDREALTRERIKEAIVAEIEDFHARREGIRQQIRFQPSLQPVASEPGCPDVEMPSPWAPSGDCAMESPPPAPPPCPGPAPDTIDLTLQPPPPVSEPAPPKKDGAISDNTKAALKAALLKSLRSRLRDGPSAPLEAPEPRKPVTAQERQREREEKRRRRQERAKEREKRRQERERKERGAGASGGPSTDPLAGLVLSDNDRSLLERWTRMARPAAPALTSVPAPAPAPTPTPTPVQPTSPPPGPLAQPTGPQPQSAGSTSGPVPQPACPPPGPAPHPTGPPGPIPVPAPPQIATSTSLLAAQSLVPPPGLPGSSTPGVLPYFPPGLPPPDAGGAPQSSMSESPDVNLVTQQLSKSQVEDPLPPVFSGTPKGSGAGYGVGFDLEEFLNQSFDMGVADGPQDGQADSASLSASLLADWLEGHGMNPADIESLQREIQMDSPMLLADLPDLQDP

SEQ ID NO: 2212 - DNA, 776 bp, Homo sapien
aaggacacgggcagcagacagtggtcagtcctttcttggctctgctgacactcgagcccacattccgtcacctgctcagaatcatgcaggtctccactgctgcccttgctgtcctcctctgcaccatggctctctgcaaccagttctctgcatcacttgctgctgacacgccgaccgcctgctgcttcagctacacctcccggcagattccacagaatttcatagctgactactttgagacgagcagccagtgctccaagcccggtgtcatcttcctaaccaagcgaagccggcaggtctgtgctgaccccagtgaggagtgggtccagaaatatgtcagcgacctagagctgagtgcctgaggggtccagaagcttcgaggcccagcgacctcggtgggccagtggggaggagcaggagcctgagccttgggaaacatgcgtgtgacctccacagctacctcttctatggactggttgttgccaaacagccacactgtgggactcttcttaacttaaattttaatttatttatactatttagtttttgtaatttattttcgatttcacagtgtgtttgtgattgtttgctctgagagttcccctgtcccctcccccttccctcacaccgcgtctggtgacaaccgagtggctgtcatcagcctgtgtaggcagtcatggcaccaaagccaccagactgacaaatgtgtatcggatgcttttgttcagggctgtgatcggcctggggaaataataaagcacgctcttttaaaaggt

SEQ ID NO: 2213 - protein, 92 aa, Homo sapien
MQVSTAALAVLLCTMALCNQFSASLAADTPTACCFSYTSRQIPQNFIADYFETSSQCSKPGVIFLTKRSRQVCADPSEEWVQKYVSDLELSA

SEQ ID NO: 2214 - DNA, 3410 bp, Homo sapien
tgcgacgtgactggctagctgcgtgggtactggaacaagcaaacgaggcagcgagcgaaggacgggagccggaccctgggccccgtggaactccagcctgcgccaccacgtcacgcacacgctcggcgctgcgatccgcgcatataacgatatttggatttgacctgcattttggaatttatctacacttaaaatgccaccagcagttggaggtccagttggatacacccccccagatggaggctggggctgggcagtggtaattggagctttcatttccatcggcttctcttatgcatttcccaaatcaattactgtcttcttcaaagagattgaaggtatattccatgccaccaccagcgaagtgtcatggatatcctccataatgttggctgtcatgtatggtggaggtcctatcagcagtatcctggtgaataaatatggaagtcgtatagtcatgattgttggtggctgcttgtcaggctgtggcttgattgcagcttctttctgtaacaccgtacagcaactatacgtctgtattggagtcattggaggtcttgggcttgccttcaacttgaatccagctctgaccatgattggcaagtatttctacaagaggcgaccattggccaacggactggccatggcaggcagccctgtgttcctctgtactctggcccccctcaatcaggttttcttcggtatctttggatggagaggaagctttctaattcttgggggcttgctactaaactgctgtgttgctggagccctcatgcgaccaatcgggcccaagccaaccaaggcagggaaagataagtctaaagcatcccttgagaaagctggaaaatctggtgtgaaaaaagatctgcatgatgcaaatacagatcttattggaagacaccctaaacaagagaaacgatcagtcttccaaacaattaatcagttcctggacttaaccctattcacccacagaggctttttgctatacctctctggaaatgtgatcatgttttttggactctttgcacctttggtgtttcttagtagttatgggaagagtcagcattattctagtgagaagtctgccttccttctttccattctggcttttgttgacatggtagcccgaccatctatgggacttgtagccaacacaaagccaataagacctcgaattcagtatttctttgcggcttccgttgttgcaaatggagtgtgtcatatgctagcacctttatccactacctatgttggattctgtgtctatgcgggattctttggatttgccttcgggtggctcagctccgtattgtttgaaacattgatggaccttgttggaccccagaggttctccagcgctgtgggattggtgaccattgtggaatgctgtcctgtcctcctggggccaccacttttaggtcggctcaatgacatgtatggagactacaaatacacatactgggcatgtggcgtcgtcctaattatttcaggtatctatctcttcattggcatgggcatcaattatcgacttttggcaaaagaacagaaagcaaacgagcagaaaaaggaaagtaaagaggaagagaccagtatagatgttgctgggaagccaaatgaagttaccaaagcagcagaatctccggaccagaaagacacagaaggagggcccaaggaggaggaaagtccagtctgaatccatggggctgaagggtaaattgagcagttcatgacccaggatatctgaaaatattctactggcctgtaatctaccagtggtgctcaatgcaaatagtagacatttgtgtggaaatcataccagttgttcattgatgggatttttgtttgactccttaccaatagcctgaatttgaggagggaatgattggtagcaaaggatgggggaaagaagtaggttctgttttgttttgttttaatcttagcttttaatagtgtcataaagattataatatgtgccttaagttttagtctttagaactctagagagccttaacttcttaaaccatttttgctgaattcatctatttcgagtgttgtgttaaaaggaaaaataacaactaacttgtttgaggcaaatctaaaatttaaaattaatcttgcttcattgttacatgtaatatatttcagacattttcactggaagatttatgaacagaaatattggttgaaagttagagattttacaaaatgctgacaaaaatattttcctagcatcagtagatttctggcatatgtttctgctagctatatatttaggaaattcaaagcataaaactttggcaacatcttggctgttctagacacagtgtacttgtcaacccctctcaggtaccttttcttgggatgcttattagaagccaagtaaagtgcttaaggtttgttttcattaaattagctatttctgctcccctgttcaaagatgcattttgagtgtttatagatcactgccctttttgaaatcacctggtattatttttcttactggaaaagttagtattaaaatctacagaactacatatttgtgcctccttggtaaatacaacacatctaattaaatgtagacagatatttcaaacatcagctgaattcacttaagtttttccaaaacctcagttaaactgtgaagctattggaatttttttttcctggaatttttcccctttgattcacagtggtcccatttatatctgcttctagcttagtgctatgtgtgagatatgtgtgtgtttggtgtttttgtttttttgtttttttttttttaaggtttgcaaattaaaaagggccagaaaaatttggcaccaggcaaacgaataaagataggattgggaaagaagttgctaagtgtgcttagttttaataagtaattccttctcttttttcagagaaggccttacagaaaattgttgtgcttagaattgctggatgcatttttaccctccacacaaacctaaaaattttgtgacccctttcacttacctgaaaagtagagaaatggattcagtataaggataaggagggaaggtggaccagaatgaaaactgtaaatatttttttaacctaatatcacttaaatcgaggcagaaagatatagacattcaatgaattatattcaatgcatttaaaataccactgtaattgacagagtaaaagtatagatacaaaaccttgtgtaagaggctgacttttccaaataaacattttttaagaaaacatttcttctcccaaatgtctattttcttgaggaaaatattgctgtgtcttcattttcattaccaggtttcattttgggccttgctaaattgattgaattaaatcctccagcttttgaaccttgaaaaaaaaaaaaaaaaaaaaaaaaaaaaaaaaaaaagaaaaaaaaaaaaaaaaag

SEQ ID NO: 2215 - protein, 500 aa, Homo sapien
MPPAVGGPVGYTPPDGGWGWAVVIGAFISIGFSYAFPKSITVFFKEIEGIFHATTSEVSWISSIMLAVMYGGGPISSILVNKYGSRIVMIVGGCLSGCGLIAASFCNTVQQLYVCIGVIGGLGLAFNLNPALTMIGKYFYKRRPLANGLAMAGSPVFLCTLAPLNQVFFGIFGWRGSFLILGGLLLNCCVAGALMRPIGPKPTKAGKDKSKASLEKAGKSGVKKDLHDANTDLIGRHPKQEKRSVFQTINQFLDLTLFTHRGFLLYLSGNVIMFFGLFAPLVFLSSYGKSQHYSSEKSAFLLSILAFVDMVARPSMGLVANTKPIRPRIQYFFAASVVANGVCHMLAPLSTTYVGFCVYAGFFGFAFGWLSSVLFETLMDLVGPQRFSSAVGLVTIVECCPVLLGPPLLGRLNDMYGDYKYTYWACGVVLIISGIYLFIGMGINYRLLAKEQKANEQKKESKEEETSIDVAGKPNEVTKAAESPDQKDTEGGPKEEESPV

SEQ ID NO: 2216 - DNA, 424 bp, Homo sapien
ctggctagacaatatcatcgaccttgtgaaaaagtacatcctggccctttggaacgaagggtacatcatgggctttatcagtaaggagcgggagcgggccatcttgagcactaagcctccaggcaccttcctgctaagattcagtgaaagcagcaaagaaggaggcgtcactttcacttgggtggagaaggacatcagcggtaagacccagatccagtccgtggaaccatacacaaagcagcagctgaacaacatgtcatttgctgaaatcatcatgggctataagatcatggatgctaccaatatcctggtgtctccactggtctatctctatcctgacattcccaaggaggaggcattcggaaagtattgtcggccagagagccaggagcatcctgaagctgacccaggtagcgctgcccca

SEQ ID NO: 2217 - DNA, 4208 bp, Homo sapien
tctttaagatttgtagctactaagaaagaaaggagctttttttccttgggccttcaaactgaaagaaccgcatgagcctgacggcgcatggtcttaacatcaggctgtgcaggaagaagctatctgcagatggatgccagcacacacaaggaagcagagctctggcaacattgagtcaaagcaaggacacaacatcagagggacggcagagaatccttgtgtgtagtctttggtggcagtttgaaaattgcaaggagggactttaagactacttctgatttgcaaagatggtctgtgctccgagcaggctaaagtgactggacgagacgcactgttggagaaataaaaatgacttcccattatgtgattgccatctttgccctgatgagcttctgtttagccactgcaggtccagagcctggtgcactgtgtgaactgtcacctgtcagtgcctcccatcctgtccaggccttgatggagagcttcactgttttgtcaggctgtgccagcagaggcacaactgggctgccacaggaggtgcatgtcctgaatctcgcactgcgccaggggcctggccagctacagagagaggtcacacttcacctgaatcccatctcctcagtccacatccaccacaagtctgttgtgttcctgctcaactccccacaccccctggtgtggcatctgaagacagagagacttgccactggggtctccagactgtttttggtgtctgagggttctgtggtccagttttcatcagcaaacttctccttgacagcagaaacagaagaaaggaacttcccccatggaaatgaacatctgttaaattgggcccgaaaagagtatggagcagttacttcattcaccgaactcaagatagcaagaaacatttatattaaagtgggggaagatcaagtgttccctccaaagtgcaacatagggaagaattttctctcactcaattaccttgctgagtaccttcaacccaaagcagcagaagggtgtgtgatgtccagccagccccagaatgaggaagtacacatcatcgagctaatcacccccaactctaacccctacagtgctttccaggtggatataacaattgatataagaccttctcaagaggatcttgaagtggtcaaaaatctcatcctgatcttgaagtgcaaaaagtctgtcaactgggtgatcaaatcttttgatgttaagggaagcctgaaaattattgctcctaacagtattggctttggaaaagagagtgaaagatctatgacaatgaccaaatcaataagagatgacattccttcaacccaagggaatctggtgaagtgggctttggacaatggctatagtccaataacttcatacacaatggctcctgtggcaatagtatttcatcttcggcttgaaaataatgaggagatgggagatgaggaagtccacactattcctcctgagctacggatcctgctggaccctggtgccctgcctgccctgcagaacccgcccatccggggaggggaaggccaaaatggaggccttccgtttcctttcccagatatttccaggagagtctggaatgaagagggagaagatgggctccctcggccaaaggaccctgtcattcccagcatacaactgtttcctggtctcagagagccagaagaggtgcaagggagcgtggatattgccctgtctgtcaaatgtgacaatgagaagatgatcgtggctgtagaaaaagattcttttcaggccagtggctactcggggatggacgtcaccctgttggatcctacctgcaaggccaagatgaatggcacacactttgttttggagtctcctctgaatggctgcggtactcggccccggtggtcagcccttgatggtgtggtctactataactccattgtgatacaggttccagcccttggggacagtagtggttggccagatggttatgaagatctggagtcaggtgataatggatttccgggagatatggatgaaggagatgcttccctgttcacccgacctgaaatcgtggtgtttaattgcagccttcagcaggtgaggaaccccagcagcttccaggaacagccccacggaaacatcaccttcaacatggagctatacaacactgacctctttttggtgccctcccagggcgtcttctctgtgccagagaatggacacgtttatgttgaggtatctgttactaaggctgaacaagaactgggatttgccatccaaacgtgctttatctctccatattcgaaccctgataggatgtctcattacaccattattgagaatatttgtcctaaagatgaatctgtgaaattctacagtcccaagagagtgcacttccctatcccgcaagctgacatggataagaagcgattcagctttgtcttcaagcctgtcttcaacacctcactgctctttctacagtgtgagctgacgctgtgtacgaagatggagaagcacccccagaagttgcctaagtgtgtgcctcctgacgaagcctgcacctcgctggacgcctcgataatctgggccatgatgcagaataagaagacgttcaccaagccccttgctgtgatccaccatgaagcagaatctaaagaaaaaggtccaagcatgaaggaaccaaatccaatttctccaccaattttccatggtctggacaccctaaccgtgatgggcattgcgtttgcagcctttgtgatcggagcactcctgacgggggccttgtggtacatctattctcacacaggggagacagcaggaaggcagcaagtccccacctccccgccagcctcggaaaacagcagtgctgcccacagcatcggcagcacgcagagcacgccttgctccagcagcagcacggcctagcccaacccaggcccaacccggcccaacccagcccagcccagctcagctcagctactccaagggcaggaccaatggctgagcctcgtgtccagactcagagggctggattttggttcccttgtaaagacagagtgaatttcagtataaagatcacccgttgtattcaccccacacccagggctagtataaacatgaccctgggcttctgtaccacactagaattcatgtgagaaagctaaaatggtggtcttctccaccagcccctcacaggcttgggggttttctatgtgaaacacatgccagtttttaaaatgctgctttgtccaggtgagaacatccataatttggggccctgagttttacccagactcaaggagttggtaaagggttaatagccagatagtagaaccagtgaggagatgcggccaaagattctttatatctgaaccaagatgtaaaacaagaaatgctttgaggctttctaagcgatcctcctgtctaatttgcacctttgtctggatgcactcttctgaccttgctgccacaacctgtggggtctgatgtgtcccaagatgggtgctgccctcagggactgcaccctgacaagtgttaaggcaacattccttgcttgtgccctgggccaaaaccaatgctgatgaccttatcagcttcctgtttcttcccatactgcatacaccactgcaaaatgtcttaatgcaaattttgtatttcttacaggcctacagaaattgaaaatgaccaaaatcaggaaccacagatttgtgcccattcctaatattttgttctgcaaattaatgtataatttgaggtgaaattcagttataaagtcaaggacgaatttgcacagtgatatatttctatgtgtatgcaagtacaagtatataatatgtcacctggcacattcattttctcagttgaagaagagaaaatttgaaaatgtccttatgcttttagagttgcaacttaagtatatttggtagggtgagtgtttccactcaaaatatgtcaacttaaaaaaaaataggccctttcataaaaaccaaactgtagcaagatgcaaatgcatggcaaatctgtcggtctccagttggttatctgaatagtgtcaccaattccaccaagacagtgctgagattggaaagggcactcatttggattgccttacttctcttgccttaaatatatcccatatatttaatatgtcaaaaagggcttgaggtgaatttcattaaatggaataatatgatgccactttgcagctaaaataagctcagtgatacctccttgtt

SEQ ID NO: 2218 - protein, 849 aa, Homo sapien
MTSHYVIAIFALMSFCLATAGPEPGALCELSPVSASHPVQALMESFTVLSGCASRGTTGLPQEVHVLNLALRQGPGQLQREVTLHLNPISSVHIHHKSVVFLLNSPHPLVWHLKTERLATGVSRLFLVSEGSVVQFSSANFSLTAETEERNFPHGNEHLLNWARKEYGAVTSFTELKIARNIYIKVGEDQVFPPKCNIGKNFLSLNYLAEYLQPKAAEGCVMSSQPQNEEVHIIELITPNSNPYSAFQVDITIDIRPSQEDLEVVKNLILILKCKKSVNWVIKSFDVKGSLKIIAPNSIGFGKESERSMTMTKSIRDDIPSTQGNLVKWALDNGYSPITSYTMAPVAIVFHLRLENNEEMGDEEVHTIPPELRILLDPGALPALQNPPIRGGEGQNGGLPFPFPDISRRVWNEEGEDGLPRPKDPVIPSIQLFPGLREPEEVQGSVDIALSVKCDNEKMIVAVEKDSFQASGYSGMDVTLLDPTCKAKMNGTHFVLESPLNGCGTRPRWSALDGVVYYNSIVIQVPALGDSSGWPDGYEDLESGDNGFPGDMDEGDASLFTRPEIVVFNCSLQQVRNPSSFQEQPHGNITFNMELYNTDLFLVPSQGVFSVPENGHVYVEVSVTKAEQELGFAIQTCFISPYSNPDRMSHYTIIENICPKDESVKFYSPKRVHFPIPQADMDKKRFSFVFKPVFNTSLLFLQCELTLCTKMEKHPQKLPKCVPPDEACTSLDASIIWAMMQNKKTFTKPLAVIHHEAESKEKGPSMKEPNPISPPIFHGLDTLTVMGIAFAAFVIGALLTGALWYIYSHTGETAGRQQVPTSPPASENSSAAHSIGSTQSTPCSSSSTA

SEQ ID NO: 2219 - DNA, 3002 bp, Homo sapien
gcactggccagacccagccagggatcctcgtattcgtcgagcctaatttccagcagccgggtaggcctcaccagaggctcctttccgtgaggccgcccccaattcctgcccctattctctgcctgggagatggcttccccgagccccccgccggagtcgaaggaggagtgggattatctggacccagctcagagaagcctgtataaagatgtcatgatggagaattatggaaacctggtctcactggatgttttgaacagagataaggatgaggagccaactgtaaaacaagagattgaagaaattgaggaagaagtggaaccacagggtgtaatagttacaagaatcaaaagtgaaattgaccaggatcctatgggtagagaaacatttgaacttgttggtaggttagataaacaaagagggatcttcctatgggaaataccaagggaatctttgacccaggaacagagaatgttcagagaaaacactaacattatccgtaaaagaccaaactcagaagagaaatgccataaatgtgaagaatgtggaaagggttttgtccgcaaggcccatttcattcaacatcaaagggtccatactggtgagaaaccttttcagtgcaatgaatgtgggaaaagttttagtcgcagttcatttgttattgaacatcagagaattcacactggggaaaggccctatgagtgtaattactgtggaaaaacctttagtgtgagctcaacccttattagacatcagagaatccacactggagaaagaccctatcagtgtaatcagtgtaaacagagcttcagccagagaaggagccttgttaaacatcaaaggattcatacaggtgagaaaccccataaatgtagtgactgtgggaaagccttcagttggaaatcacaccttattgagcatcaaagaactcacactggtgagaaaccttatcactgtaccaaatgtaagaagagctttagtcgaaattcattgcttgttgagcatcaaagaattcacactggggaaagaccccataaatgtggtgaatgtgggaaagcctttcgattaagcacataccttatacaacaccaaaaaattcacactggcgagaagccttttctttgtattgagtgtggaaaaagtttcagtcggagctcattccttattgaacatcagaggatccatactggtgaaagaccttatcagtgcaaagagtgtgggaaaagtttcagtcagctttgcaaccttactcgtcatcagagaattcacacaggagacaagccccataaatgtgaggaatgtggaaaagcctttagtagaagctcaggtcttattcagcatcagagaattcacaccagggagaagacttatccatacaatgaaactaaggaaagttttgatccaaattgcagtcttgttatacagcaggaagtctaccctaaggagaaatcttataaatgtgatgaatgtgggaaaacttttagtgttagtgctcatcttgtacaacatcaaagaatccacactggtgaaaagccctatctatgtactgtctgtgggaagagcttcagccggagctcatttcttattgaacatcagagaatccacactggagagagaccctatctgtgcagacagtgtggaaaaagctttagtcagctttgtaatcttattcgacatcagggtgttcacacaggtaataaaccccataaatgtgatgaatgtggaaaggcctttagccggaactcgggtcttattcagcatcagagaatacacacaggagagaaaccttataagtgtgagaagtgcgacaaaagtttcagtcaacagcgcagtcttgtcaaccatcagatgatccatgcagaggtgaaaacccaagaaacccatgaatgtgatgcttgtggtgaagcctttaattgccgtatttctcttattcagcatcagaaattgcacacagcatggatgcaataaatgtagagcaatacataagctcaatttgatttgagactagtacccaagtgcagttttagtatggctcaacatggatcagatttagtgataaagcaaattctccttgggcctcaggcaaatagtttctaaagattctgtgaatagtggacaactgcccatgagcatttgacttcccttactctttgatgatcgtagagaaagacttggtaatttatctaagtatctttaataaatctttcagcagagagattaaacctaggttcagagcatgggtgctctgagggacaaagttggattagtataagggagctggagcagctgatagtggaaaacagaataatgattcaaagagtcttctgtcaccatgtcatattgtgggtctttcagttccatgatatgtttggctctgcatgccaaagtcccagtgattaagcatatataagttgtcaaggaaacaaagcccaaatgtttttaaaacaagtatacagtttttgtcattgtttaagaaagccatttgtttggcatgtgagttaaaggcagttccaatgcctgatggttccccagatctatgaaatgggtggaccattaaccttacatgtaaagattatgttagtaattaagaaaccctaacaaaggtgttaccaaggaacctttgggagtgccttttttgtttttcaagatggacccaaaaaaagtggaggaagatattgttcttttgtgccctcctacctgtgagagatatttgtagtcctatgtgaatgagcttatccctccacaaccaggtgcatatgaaagtgtacatattatgactgccaagtattggaaatgaaaagacctggagtctatgctaggaagctgagatattttggtattgcattggtttttatggtaactaggttttgcatgcaattaaaaatccttatttcttgttctagggcttcccttagttaatggttattataaacctattaattcatctgttttaaccattaaaacctgttttgtttttcgctttgaaaaaaaaaaaaaaaaaa

SEQ ID NO: 2220 - protein, 612 aa, Homo sapien
MASPSPPPESKEEWDYLDPAQRSLYKDVMMENYGNLVSLDVLNRDKDEEPTVKQEIEEIEEEVEPQGVIVTRIKSEIDQDPMGRETFELVGRLDKQRGIFLWEIPRESLTQEQRMFRENTNIIRKRPNSEEKCHKCEECGKGFVRKAHFIQHQRVHTGEKPFQCNECGKSFSRSSFVIEHQRIHTGERPYECNYCGKTFSVSSTLIRHQRIHTGERPYQCNQCKQSFSQRRSLVKHQRIHTGEKPHKCSDCGKAFSWKSHLIEHQRTHTGEKPYHCTKCKKSFSRNSLLVEHQRIHTGERPHKCGECGKAFRLSTYLIQHQKIHTGEKPFLCIECGKSFSRSSFLIEHQRIHTGERPYQCKECGKSFSQLCNLTRHQRIHTGDKPHKCEECGKAFSRSSGLIQHQRIHTREKTYPYNETKESFDPNCSLVIQQEVYPKEKSYKCDECGKTFSVSAHLVQHQRIHTGEKPYLCTVCGKSFSRSSFLIEHQRIHTGERPYLCRQCGKSFSQLCNLIRHQGVHTGNKPHKCDECGKAFSRNSGLIQHQRIHTGEKPYKCEKCDKSFSQQRSLVNHQMIHAEVKTQETHECDACGEAFNCRISLIQHQKLHTAWMQ

SEQ ID NO: 2221 - DNA, 2208 bp, Homo sapien
attcctcggtatatcttggggactggaggacctgtctggttattatacagacgcataactggaggtgggatccacacagctcagaacagctggatcttgctcagtctctgccaggggaagattccttggaggaggccctgcagcgacatggagggagctgctttgctgagagtctctgtcctctgcatctggatgagtgcacttttccttggtgtgggagtgagggcagaggaagctggagcgagggtgcaacaaaacgttccaagtgggacagatactggagatcctcaaagtaagcccctcggtgactgggctgctggcaccatggacccagagagcagtatctttattgaggatgccattaagtatttcaaggaaaaagtgagcacacagaatctgctactcctgctgactgataatgaggcctggaacggattcgtggctgctgctgaactgcccaggaatgaggcagatgagctccgtaaagctctggacaaccttgcaagacaaatgatcatgaaagacaaaaactggcacgataaaggccagcagtacagaaactggtttctgaaagagtttcctcggttgaaaagtgagcttgaggataacataagaaggctccgtgcccttgcagatggggttcagaaggtccacaaaggcaccaccatcgccaatgtggtgtctggctctctcagcatttcctctggcatcctgaccctcgtcggcatgggtctggcacccttcacagagggaggcagccttgtactcttggaacctgggatggagttgggaatcacagcagctttgaccgggattaccagcagtaccatagactacggaaagaagtggtggacacaagcccaagcccacgacctggtcatcaaaagccttgacaaattgaaggaggtgaaggagtttttgggtgagaacatatccaactttctttccttagctggcaatacttaccaactcacacgaggcattgggaaggacatccgtgccctcagacgagccagagccaatcttcagtcagtaccgcatgcctcagcctcacgcccccgggtcactgagccaatctcagctgaaagcggtgaacaggtggagagagttaatgaacccagcatcctggaaatgagcagaggagtcaagctcacggatgtggcccctgtaggcttctttcttgtgctggatgtagtctacctcgtgtacgaatcaaagcacttacatgagggggcaaagtcagagacagctgaggagctgaagaaggtggctcaggagctggaggagaagctaaacatgctcaacaataattataagattctgcaggcggaccaagaactgtgaccacagggcagggcagccaccaggagagatatgcctggcaggggccaggacaaaatgcaaacttttttttttctgagacggagtcttgctctgtcgccaaggtggagcttgcagtgagccgagatatcgccactgcactccagcctgggtgacagagcgagactccgtctcaaaaaaaaaaaaaaaaaagaatatattgacggaagaatagagaggaggcttgaaggaaccagcaatgagaaggccaggaaaagaaagagctgaaaatggagaaagcccaagagttagaacagttggatacaggagaagaaacagcggctccactacagacccagccccaggttcaatgtcctccgaagaatgaagtctttccctggtgatggtcccctgccctgtctttccagcatccactctcccttgtcctcctgggggcacatctcagtcaggcagcggcttcctgatgatggtcgttggggtggttgtcatgtgatgggtcccctccaggttactaaagggtgcatgtcccctgcttgaacactgaagggcaggtggtgggccatggccatggtccccagctgaggagcaggtgtccctgagaacccaaacttcccagagagtatgtgagaaccaaccaatgaaaacagtcccatcgctcttacccggtaagtaaacagtcagaaaattagcatgaaagcagtttagcattgggaggaagctcagatctctagagctgtcttgtcgccgcccaggattgacctgtgtgtaagtcccaataaactcacctactcatcaaaaaaaaaaaaaaaaaaaaaaaaaaaaaaaaaaaaaaaaaaaaaaaaaaaaaaaaaaaaaaaaaaaaaaaaa

SEQ ID NO: 2222 - protein, 398 aa, Homo sapien [sequence omitted]

SEQ ID NO: 2223 - DNA, 1683 bp, Homo sapien
atgggggacgctcccagccctgaagagaaactgcaccttatcacccggaacctgcaggaggttctgggggaagagaagctgaaggagatactgaaggagcgggaacttaaaatttactggggaacggcaaccacgggcaaaccacatgtggcttactttgtgcccatgtcaaagattgcagacttcttaaaggcagggtgtgaggtaacaattctgtttgcggacctccacgcatacctggataacatgaaagccccatgggaacttctagaactccgagtcagttactatgagaatgtgatcaaagcaatgctggagagcattggtgtgcccttggagaagctcaagttcatcaaaggcactgattaccagctcagcaaagagtacacactagatgtgtacagactctcctccgtggtcacacagcacgattccaagaaggctggagctgaggtggtaaagcaggtggagcaccctttgctgagtggcctcttataccccggactgcaggctttggatgaagagtatttaaaagtagatgcccaatttggaggcattgatcagagaaagattttcacctttgcagagaagtacctccctgcacttggctattcaaaacgggtccatctgatgaatcctatggttccaggattaacaggcagcaaaatgagctcttcagaagaggagtccaagattgatctccttgatcggaaggaggatgtgaagaaaaaactgaagaaggccttctgtgagccaggaaatgtggagaacaatggggttctgtccttcatcaagcatgtcctttttccccttaagtccgagtttgtgatcctacgagatgagaaatggggtggaaacaaaacctacacagcttacgtggacctggaaaaggactttgctgctgaggttgtacatcctggagacctgaagaattctgttgaagtcgcactgaacaagttgctggatccaatccgggaaaagtttaatacccctgccctgaaaaaactggccagcgctgcctacccagatccctcaaagcagaagccaatggccaaaggccctgccaagaattcagaaccagaggaggtcatcccatcccggctggatatccgtgtggggaaaatcatcactgtggagaagcacccagatgcagacagcctgtatgtagagaagattgacgtgggggaagctgaaccacggactgtggtgagcggcctggtacagttcgtgcccaaggaggaactgcaggacaggctggtagtggtgctgtgcaacctgaaaccccagaagatgagaggagtcgagtcccaaggcatgcttctgtgtgcttctatagaagggataaaccgccaggttgaacctctggaccctccggcaggctctgctcctggtgagcacgtgtttgtgaagggctatgaaaagggccaaccagatgaggagctcaagcccaagaagaaagtcttcgagaagttgcaggctgacttcaaaatttctgaggagtgcatcgcacagtggaagcaaaccaacttcatgaccaagctgggctccatttcctgtaaatcgctgaaaggggggaacattagctagccagcccagcatcttccccccttcttccaccactgagtcatctgctgtctcttcagtctgctccatccatcacccatttacccatctctcaggaca

SEQ ID NO: 2224 - protein, 528 aa, Homo sapien
MGDAPSPEEKLHLITRNLQEVLGEEKLKEILKERELKIYWGTATTGKPHVAYFVPMSKIADFLKAGCEVTILFADLHAYLDNMKAPWELLELRVSYYENVIKAMLESIGVPLEKLKFIKGTDYQLSKEYTLDVYRLSSVVTQHDSKKAGAEVVKQVEHPLLSGLLYPGLQALDEEYLKVDAQFGGIDQRKIFTFAEKYLPALGYSKRVHLMNPMVPGLTGSKMSSSEEESKIDLLDRKEDVKKKLKKAFCEPGNVENNGVLSFIKHVLFPLKSEFVILRDEKWGGNKTYTAYVDLEKDFAAEVVHPGDLKNSVEVALNKLLDPIREKFNTPALKKLASAAYPDPSKQKPMAKGPAKNSEPEEVIPSRLDIRVGKIITVEKHPDADSLYVEKIDVGEAEPRTVVSGLVQFVPKEELQDRLVVVLCNLKPQKMRGVESQGMLLCASIEGINRQVEPLDPPAGSAPGEHVFVKGYEKGQPDEELKPKKKVFEKLQADFKISEECIAQWKQTNFMTKLGSISCKSLKGGNIS

SEQ ID NO: 2225 - DNA, 2359 bp, Homo sapien
ctgagcgggggagcggcggcccccagctgaatgggcgcgagagcggcgctgggggcgggtgggggcgcggggtaccgggctggcggccggccggcgccccctcattagtatgcggacgaaggcggcgggctgcgcggagcggcgtcccctgcagccgcggaccgaggcagcggcggcacctgccggccgagcaatgccaagtgagtacacctatgtgaaactgagaagtgattgctcgaggccttccctgcaatggtacacccgagctcaaagcaagatgagaaggcccagcttgttattaaaagacatcctcaaatgtacattgcttgtgtttggagtgtggatcctttatatcctcaagttaaattatactactgaagaatgtgacatgaaaaaaatgcattatgtggaccctgaccgtgtaaagagagctcagaaatatgctcagcaagtcttgcagaaggaatgtcgtcccaagtttgccaagacatcaatggcgctgttatttgagcacaggtatagcgtggacttactcccttttgtgcagaaggcccccaaagacagtgaagctgagtccaagtacgatcctccttttgggttccggaagttctccagtaaagtccagaccctcttggaactcttgccagagcacgacctccctgaacacttgaaagccaagacctgtcggcgctgtgtggttattggaagcggaggaatactgcacggattagaactgggccacaccctgaaccagttcgatgttgtgataaggttaaacagtgcaccagttgagggatattcagaacatgttggaaataaaactactataaggatgacttatccagagggcgcaccactgtctgaccttgaatattattccaatgacttatttgttgctgttttatttaagagtgttgatttcaactggcttcaagcaatggtaaaaaaggaaaccctgccattctgggtacgactcttcttttggaagcaggtggcagaaaaaatcccactgcagccaaaacatttcaggattttgaatccagttatcatcaaagagactgcctttgacatccttcagtactcagagcctcagtcaaggttctggggccgagataagaacgtccccacaatcggtgtcattgccgttgtcttagccacacatctgtgcgatgaagtcagtttggcgggttttggatatgacctcaatcaacccagaacacctttgcactacttcgacagtcaatgcatggctgctatgaactttcagaccatgcataatgtgacaacggaaaccaagttcctcttaaagctggtcaaagagggagtggtgaaagatctcagtggaggcattgatcgtgaattttgaacacagaaaacctcagttgaaaatgcaactctaactctgagagctgtttttgacagccttcttgatgtatttctccatcctgcagatactttgaagtgcagctcatgtttttaacttttaatttaaaaacacaaaaaaaattttagctcttcccactttttttttcctatttatttgaggtcagtgtttgtttttgcacaccattttgtaaatgaaacttaagaattgaattggaaagacttctcaaagagaattgtatgtaacgatgttgtattgatttttaagaaagtaatttaatttgtaaaacttctgctcgtttacactgcacattgaatacaggtaactaattggaaggagaggggaggtcactcttttgatggtggccctgaacctcattctggttccctgctgcgctgcttggtgtgacccacggaggatccactcccaggatgacgtgctccgtagctctgctgctgatactgggtctgcgatgcagcggcgtgaggcctgggctggttggagaaggtcacaacccttctctgttggtctgccttctgctgaaagactcgagaaccaaccagggaagctgtcctggaggtccctggtcggagagggacatagaatctgtgacctctgacaactgtgaagccaccctgggctacagaaaccacagtcttcccagcaattattacaattcttgaattccttggggattttttactgccctttcaaagcacttaagtgttagatctaacgtgttccagtgtctgtctgaggtgacttaaaaaatcagaacaaaacttctattatccagagtcatgggagagtacaccctttccaggaataatgttttgggaaacactgaaatgaaatcttcccagtattataaattgtgtatttaaaaaaaagaaacttttctgaatgcctacctggcggtgtataccaggcagtgtgccagtttaaaaagatgaaaaagaataaaaacttttgagg

SEQ ID NO: 2226 - protein, 362 aa, Homo sapien
MRRPSLLLKDILKCTLLVFGVWILYILKLNYTTEECDMKKMHYVDPDRVKRAQKYAQQVLQKECRPKFAKTSMALLFEHRYSVDLLPFVQKAPKDSEAESKYDPPFGFRKFSSKVQTLLELLPEHDLPEHLKAKTCRRCVVIGSGGILHGLELGHTLNQFDVVIRLNSAPVEGYSEHVGNKTTIRMTYPEGAPLSDLEYYSNDLFVAVLFKSVDFNWLQAMVKKETLPFWVRLFFWKQVAEKIPLQPKHFRILNPVIIKETAFDILQYSEPQSRFWGRDKNVPTIGVIAVVLATHLCDEVSLAGFGYDLNQPRTPLHYFDSQCMAAMNFQTMHNVTTETKFLLKLVKEGVVKDLSGGIDREF

SEQ ID NO: 2227 - DNA, 681 bp, Homo sapien
atggattggggcacgctgcagacgatcctggggggtgtgaacaaacactccaccagcattggaaagatctggctcaccgtcctcttcatttttcgcattatgatcctcgttgtggctgcaaaggaggtgtggggagatgagcaggccgactttgtctgcaacaccctgcagccaggctgcaagaacgtgtgctacgatcactacttccccatctcccacatccggctatgggccctgcagctgatcttcgtgtccagcccagcgctcctagtggccatgcacgtggcctaccggagacatgagaagaagaggaagttcatcaagggggagataaagagtgaatttaaggacatcgaggagatcaaaacccagaaggtccgcatcgaaggctccctgtggtggacctacacaagcagcatcttcttccgggtcatcttcgaagccgccttcatgtacgtcttctatgtcatgtacgacggcttctccatgcagcggctggtgaagtgcaacgcctggccttgtcccaacactgtggactgctttgtgtcccggcccacggagaagactgtcttcacagtgttcatgattgcagtgtctggaatttgcatcctgctgaatgtcactgaattgtgttatttgctaattagatattgttctgggaagtcaaaaaagccagtttaa

SEQ ID NO: 2228 - protein, 226 aa, Homo sapien
MDWGTLQTILGGVNKHSTSIGKIWLTVLFIFRIMILVVAAKEVWGDEQADFVCNTLQPGCKNVCYDHYFPISHIRLWALQLIFVSSPALLVAMHVAYRRHEKKRKFIKGEIKSEFKDIEEIKTQKVRIEGSLWWTYTSSIFFRVIFEAAFMYVFYVMYDGFSMQRLVKCNAWPCPNTVDCFVSRPTEKTVFTVFMIAVSGICILLNVTELCYLLIRYCSGKSKKPV

SEQ ID NO: 2229 - DNA, 1692 bp, Homo sapien
caactacaagcaaacagcacaattaatgcaacattcagcaactccagaccagcttttcttacccccatgaagaacgatcaatttaaaaaacacagatctcaggtttcctcccaagctgtcagcgagcgctgctaccggtctagattgccatgtcccaacaacagcaaagccaccctccctcctgcttcttccaggattgctctttaaagggaccagagtgacatactgatgcctggggaataaaggtggagcgtgtggaaattaaggatgtgaaactacctgtgcagctccagagagctatggctgcagaagcagaagcgtcccgcgaggcccgcgccaaggttattgcagccgaaggagaaatgaatgcatccagggctctgaaagaagcctccatggtcatcactgaatctcctgcagcccttcagctccgatacctgcagacactgaccaccattgctgctgagaaaaactcaacaattgtcttccctctgcccatagatatgctgcaaggaatcataggggcaaaacacagccatctaggctagtgtagagatgagcgctagccttccaagcatgaagtcggggaccaaattagcctttaactcataaagagagggtagggcttttctttttccatatgtcaattgtggtgttcccagaatgtatagcagttataaaaataggtgaaagaattgttagcttgtaaatactgagagattggtgatttatataaggtaatctgttagtcttaaaatagttaaaagtttgtatttttagattattatgtagtaggttagatccctcttgttttgacttccactgactcattctgaaccccctaagcacccaggccagaggcaagaacctgggctgtaactgccacctgacaccgctgactggctaaatgctttgcagaaagtgatgaccttacaccacaaccagcttctccaggtcatatgtgccttacctccagagagtctttttttttttttttctgagatggagtttcactcttgttgcccaggctggagtgcaatagcatgatctcggctcactgcaacctccgcctcctgggttcaagagattctcctgcctcagcctccccagtagctgggattacaggctcataccaccatgcccagctaatttttgtattattattattgttttttagtagagacggggtttcaccatgttggccaggctagtcacgaactcctaacctcaggtgatccacccacctctgcctcccaaagtgctgggattacaggcatgagctaccacacctggtttggagagtcttaattaaggaaatttccctaatgttcatttattttctaaatccagaccgtgtttcagaataatccttacttgagagtagccattttcttgcctgtacttgtcagaactagaggaaatagccaagactaatgaaaaagattactctaacccttaaaagacttttaaattcactactagagtggtcattttaaaaatacatccatgttttaacttatttgagccttctttatgagtaaatgattcctccttgttctgtctttcaaaccagctaaatatttgtcacaaaagtgcttttttctcactgttgcctattttcatatatcaggttttaaatagttttaattttttaataaaattttctctacgttctataaaaaaaaaaaaaaa

SEQ ID NO: 2230 - DNA, 1400 bp, Homo sapien
cggcaaaaaaaaaaggcgtaagaattttgaagctatgttcaaaggtatccttcagagtggattggataacttcgtgataaaccacatgctaaagaacaacgtggctggacaaacatctatccagaccctagtacctaatacggatcaaaagtcgaccagtgtaaaaaaagacaaccacaaaaaaaaaacagttaagatgttggaatacctgggcaaagatgttcttcatggtgtttttaattatttggcaaaacacgatgttctgacattgaaggaagaggaaaagaaaaaatattatgatgccaaaattgaagacaaggccctgatcttggtagactctttgcgaaagaatcgcgtggctcatcaaatgtttacccaaacacttctcaatatggaccaaaagatcaccagtgtaaaacctcttctgcaaatcgaggctggaccacctgagtcagcagaatctacaaatatactcaaactttgtcctcgtgaagaattcctgagactgtgtaaaaaaaatcatgatgagatctatccaataaaaaagagagaggaccgcagacgcctggctctcatcatatgcaatacaaagtttgatcacctgcctgcaaggaatggggctcactatgacatcgtggggatgaaaaggctgcttcaaggcctgggctacactgtggttgacgaaaagaatctcacagccagggatatggagtcagtgctgagggcatttgctgccagaccagagcacaagtcctctgacagcacgttcttggtactcatgtctcatggcatcctagagggaatctgcggaactgcgcataaaaagaaaaaaccggatgtgctgctttatgacaccatcttccagatattcaacaaccgcaactgcctcagtctaaaggacaaacccaaggtcatcattgtccaggcctgcagaggtgaaaaacatggggaactctgggtcagagactctccagcatccttggcagtcatctcttcacagtcatctgagaacctggaggcagattctgtttgcaagatccacgaggagaaggacttcattgctttctgttcttcaacaccacataacgtgtcctggagagaccgcacaaggggctccatcttcattacggaactcatcacatgcttccagaaatattcttgctgctgccacctaatggaaatatttcggaaggtacagaaatcatttgaagttccacaggctaaagcccagatgcccaccatagaacgagcaaccttgacaagagatttctacctctttcctggcaattgaaaatgaaaccacaggcagcccagccctcctctgtcaacatcaaagagcacatttaccagtatagcttgcatagtcaatatttggtatttcaataaaagtaaagactgta

SEQ ID NO: 2231 - protein, 418 aa, Homo sapien
MFKGILQSGLDNFVINHMLKNNVAGQTSIQTLVPNTDQKSTSVKKDNHKKKTVKMLEYLGKDVLHGVFNYLAKHDVLTLKEEEKKKYYDAKIEDKALILVDSLRKNRVAHQMFTQTLLNMDQKITSVKPLLQIEAGPPESAESTNILKLCPREEFLRLCKKNHDEIYPIKKREDRRRLALIICNTKFDHLPARNGAHYDIVGMKRLLQGLGYTVVDEKNLTARDMESVLRAFAARPEHKSSDSTFLVLMSHGILEGICGTAHKKKKPDVLLYDTIFQIFNNRNCLSLKDKPKVIIVQACRGEKHGELWVRDSPASLAVISSQSSENLEADSVCKIHEEKDFIAFCSSTPHNVSWRDRTRGSIFITELITCFQKYSCCCHLMEIFRKVQKSFEVPQAKAQMPTIERATLTRDFYLFPGN

SEQ ID NO: 2232 - DNA, 1061 bp, Homo sapien
agacaaaaagtaaccttcctgaagaggacatgtgattggaagttgtcaattgttgaagcattggtaactccagtctctaacgttttagaaaatcataacaagcggttctgtaccctgtaaagaacagaaacctggaaatctaaggctcaaagacatccaagtaattggtatctgggagatttgggattcaaacccagctctgcttgacttggtgaactactgagttcttcattatgtctgatggagattatgattacctcatcaagtttttagctttgggagactctggtgtagggaagaccagtgtactttaccaatatacagatggtaaatttaactccaaatttatcacaacagtgggcattgatttcaggccaaaaagagtggtgtacagagccagtgggccggatggaccagtaggtagaggccagagaatccacctgcagttatgggacacagcagggcaggagaggtttcgtagcttaacgacagcgttcttcagagatgctatgggttttcttctactttttgatctgacaaatgagcaaagtttcctcaatgtcagaaactggataagccagctacagatgcatgcatattgtgaaaacccagatatagtgctgtgtggaaacaagagtgatctggaggaccagagagtagtgaaagaggaggaagccatagcactcgcagagaaatatggaatcccctactttgaaactagtgctgccaatgggacaaacataagccaagcaattgagatgcttctggacctgataatgaagcgaatggaacggtgtgtggacaagtcctggattcctgaaggagtggtgcgatcaaatggtcatgcctctacggatcagttaagtgaagaaaaggagaaaggggcatgtggctgttgagaagtcaagtaacgacatagtagttcaggtggcccatgcctgggatcttctctatgattgatacatggcacagtgagagattaatgggcattgtgtacaaattgcttctcaccatccccattagacctacgaataaagcatccggttctaaaattaaaaaaa

SEQ ID NO: 2233 - protein, 221 aa, Homo sapien
MSDGDYDYLIKFLALGDSGVGKTSVLYQYTDGKFNSKFITTVGIDFRPKRVVYRASGPDGPVGRGQRIHLQLWDTAGQERFRSLTTAFFRDAMGFLLLFDLTNEQSFLNVRNWISQLQMHAYCENPDIVLCGNKSDLEDQRVVKEEEAIALAEKYGIPYFETSAANGTNISQAIEMLLDLIMKRMERCVDKSWIPEGVVRSNGHASTDQLSEEKEKGACGC

SEQ ID NO: 2234 - DNA, 1813 bp, Homo sapien
cccctcccgcgcgcccgcccgccgcctgccgccgccgccgccgccgccggagctctgtagtatggcatcgaggagaatggagaccaaacctgtgataacctgtctcaaaaccctcctcatcatctactccttcgtcttctggatcactggggtgatcctgctggctgttggagtctggggcaaacttactctgggcacctatatctcccttattgccgagaactccacaaatgctccctatgtgctcatcggaactggcaccactattgttgtctttggcctgtttggatgctttgctacatgtcgtggtagcccatggatgctgaaactgtatgccatgtttctgtccctggtgttcctggctgagctcgtagctggcatttcagggtttgtgtttcgtcatgagatcaaggacaccttcctgaggacttacacggacgctatgcagacttacaatggcaatgatgagaggagccgggcagtggaccatgtgcagcgcagcctgagctgctgtggtgtgcagaactacaccaactggagcaccagcccctacttcctggagcatggcatcccccccagctgctgcatgaacgaaactgattgtaatccccaggatctacacaatctgactgtggccgccaccaaagttaaccagaagggttgttatgatctggtaactagtttcatggagactaacatgggaatcatcgctggagtggcgtttggaatcgcattctcccagttaattggcatgctgctggcctgctgtctgtcccggttcatcacggccaatcagtatgagatggtgtaaggagaagtctttcaagaatgacggaataagagacctgttttaaaaaggaactgcagcaatctttgaaagacttccaaagaatgttagagcacagtacataatacacttgccctgctccctctaccccttaccccacaacgtgcaactgacactcccacccagtctctgctccacctttcagcccacgtcacgtgtagtgtccattttgtgaagccctgttgtgccacagagtgtagccaggtccccctgcagctagtcctagtgaacctcaccccgaggccctgcatgggccagcccctccatctgtacttggtccaactgcaactcatcatcggtgactggttatcacaccatcgctggcccctttgggccctgcatgtagtgtgggaggctcctgttagctcctcactgtggtaaatgccacacacctttaagtagataagcagacgatagttatctgttcttttgacttaatctcatttggtttgattttccctctactaaggctttcctaccttcttcaggctgcctaagacatgtaacgaaacacttcaataattgtccatgaggagaaaaaaagcatgtgtcatgcatgaaggaaactgaacttgaggtggcctccttgcttgttacatacctgggtatgtgtaggcagtttagtgcatctttgcctctcagttgaaacctgtataaccctgttacaaagctgtgttgttgcttcttgtgaaggccatgatattttgtttttccccaattaattgctattgtgttattttactacttctctctgtattttttcttgcattgacattatagacattgaggacctcatccaaacaatttaaaaatgagtgtgaagggggaacaagtcaaaatatttttaaaagatcttcaaaaataatgcctctgtctagcatgccaacaagaatgcattgatattgtgaacatttgtgatatatgtattaataaatagagcaattacaagcaaaaaaaaaaaaaaaa

SEQ ID NO: 2235 - protein, 244 aa, Homo sapien
METKPVITCLKTLLIIYSFVFWITGVILLAVGVWGKLTLGTYISLIAENSTNAPYVLIGTGTTIVVFGLFGCFATCRGSPWMLKLYAMFLSLVFLAELVAGISGFVFRHEIKDTFLRTYTDAMQTYNGNDERSRAVDHVQRSLSCCGVQNYTNWSTSPYFLEHGIPPSCCMNETDCNPQDLHNLTVAATKVNQKGCYDLVTSFMETNMGIIAGVAFGIAFSQLIGMLLACCLSRFITANQYEMV

SEQ ID NO: 2236 - DNA, 4950 bp, Homo sapien
cagagcagggtggagagggcggtgggaggcgtgtgcctgagtgggctctactgccttgttccatattattttgtgcacattttccctggcactctgggttgctagccccgccgggcactgggcctcagacactgcgcggttccctcggagcagcaagctaaagaaagcccccagtgccggcgaggaaggaggcggcggggaaagatgcgcggcgttggctggcagatgctgtccctgtcgctggggttagtgctggcgatcctgaacaaggtggcaccgcaggcgtgcccggcgcagtgctcttgctcgggcagcacagtggactgtcacgggctggcgctgcgcagcgtgcccaggaatatcccccgcaacaccgagagactggatttaaatggaaataacatcacaagaattacgaagacagattttgctggtcttagacatctaagagttcttcagcttatggagaataagattagcaccattgaaagaggagcattccaggatcttaaagaactagagagactgcgtttaaacagaaatcaccttcagctgtttcctgagttgctgtttcttgggactgcgaagctatacaggcttgatctcagtgaaaaccaaattcaggcaatcccaaggaaagctttccgtggggcagttgacataaaaaatttgcaactggattacaaccagatcagctgtattgaagatggggcattcagggctctccgggacctggaagtgctcactctcaacaataacaacattactagactttctgtggcaagtttcaaccatatgcctaaacttaggacttttcgactgcattcaaacaacctgtattgtgactgccacctggcctggctctccgactggcttcgccaaaggcctcgggttggtctgtacactcagtgtatgggcccctcccacctgagaggccataatgtagccgaggttcaaaaacgagaatttgtctgcagtggtcaccagtcatttatggctccttcttgtagtgttttgcactgccctgccgcctgtacctgtagcaacaatatcgtagactgtcgtgggaaaggtctcactgagatccccacaaatcttccagagaccatcacagaaatacgtttggaacagaacacaatcaaagtcatccctcctggagctttctcaccatataaaaagcttagacgaattgacctgagcaataatcagatctctgaacttgcaccagatgctttccaaggactacgctctctgaattcacttgtcctctatggaaataaaatcacagaactccccaaaagtttatttgaaggactgttttccttacagctcctattattgaatgccaacaagataaactgccttcgggtagatgcttttcaggatctccacaacttgaaccttctctccctatatgacaacaagcttcagaccatcgccaaggggaccttttcacctcttcgggccattcaaactatgcatttggcccagaacccctttatttgtgactgccatctcaagtggctagcggattatctccataccaacccgattgagaccagtggtgcccgttgcaccagcccccgccgcctggcaaacaaaagaattggacagatcaaaagcaagaaattccgttgttcagctaaagaacagtatttcattccaggtacagaagattatcgatcaaaattaagtggagactgctttgcggatctggcttgccctgaaaagtgtcgctgtgaaggaaccacagtagattgctctaatcaaaagctcaacaaaatcccggagcacattccccagtacactgcagagttgcgtctcaataataatgaatttaccgtgttggaagccacaggaatctttaagaaacttcctcaattacgtaaaataaactttagcaacaataagatcacagatattgaggagggagcatttgaaggagcatctggtgtaaatgaaatacttcttacgagtaatcgtttggaaaatgtgcagcataagatgttcaagggattggaaagcctcaaaactttgatgttgagaagcaatcgaataacctgtgtggggaatgacagtttcataggactcagttctgtgcgtttgctttctttgtatgataatcaaattactacagttgcaccaggggcatttgatactctccattctttatctactctaaacctcttggccaatccttttaactgtaactgctacctggcttggttgggagagtggctgagaaagaagagaattgtcacgggaaatcctagatgtcaaaaaccatacttcctgaaagaaatacccatccaggatgtggccattcaggacttcacttgtgatgacggaaatgatgacaatagttgctccccactttctcgctgtcctactgaatgtacttgcttggatacagtcgtccgatgtagcaacaagggtttgaaggtcttgccgaaaggtattccaagagatgtcacagagttgtatctggatggaaaccaatttacactggttcccaaggaactctccaactacaaacatttaacacttatagacttaagtaacaacagaataagcacgctttctaatcagagcttcagcaacatgacccagctcctcaccttaattcttagttacaaccgtctgagatgtattcctcctcgcacctttgatggattaaagtctcttcgattactttctctacatggaaatgacatttctgttgtgcctgaaggtgctttcaatgatctttctgcattatcacatctagcaattggagccaaccctctttactgtgattgtaacatgcagtggttatccgactgggtgaagtcggaatataaggagcctggaattgctcgttgtgctggtcctggagaaatggcagataaacttttactcacaactccctccaaaaaatttacctgtcaaggtcctgtggatgtcaatattctagctaagtgtaacccctgcctatcaaatccgtgtaaaaatgatggcacatgtaatagtgatccagttgacttttaccgatgcacctgtccatatggtttcaaggggcaggactgtgatgtcccaattcatgcctgcatcagtaacccatgtaaacatggaggaacttgccacttaaaggaaggagaagaagatggattctggtgtatttgtgctgatggatttgaaggagaaaattgtgaagtcaacgttgatgattgtgaagataatgactgtgaaaataattctacatgtgtcgatggcattaataactacacatgcctttgcccacctgagtatacaggtgagttgtgtgaggagaagctggacttctgtgcccaggacctgaacccctgccagcacgattcaaagtgcatcctaactccaaagggattcaaatgtgactgcacaccagggtacgtaggtgaacactgcgacatcgattttgacgactgccaagacaacaagtgtaaaaacggagcccactgcacagatgcagtgaacggctatacgtgcatatgccccgaaggttacagtggcttgttctgtgagttttctccacccatggtcctccctcgtaccagcccctgtgataattttgattgtcagaatggagctcagtgtatcgtcagaataaatgagccaatatgtcagtgtttgcctggctatcagggagaaaagtgtgaaaaattggttagtgtgaattttataaacaaagagtcttatcttcagattccttcagccaaggttcggcctcagacgaacataacacttcagattgccacagatgaagacagcggaatcctcctgtataagggtgacaaagaccatatcgcggtagaactctatcgggggcgtgttcgtgccagctatgacaccggctctcatccagcttctgccatttacagtgtggagacaatcaatgatggaaacttccacattgtggaactacttgccttggatcagagtctctctttgtccgtggatggtgggaaccccaaaatcatcactaacttgtcaaagcagtccactctgaattttgactctccactctatgtaggaggcatgccagggaagagtaacgtggcatctctgcgccaggcccctgggcagaacggaaccagcttccacggctgcatccggaacctttacatcaacagtgagctgcaggacttccagaaggtgccgatgcaaacaggcattttgcctggctgtgagccatgccacaagaaggtgtgtgcccatggcacatgccagcccagcagccaggcaggcttcacctgcgagtgccaggaaggatggatggggcccctctgtgaccaacggaccaatgacccttgccttggaaataaatgcgtacatggcacctgcttgcccatcaatgcgttctcctacagctgtaagtgcttggagggccatggaggtgtcctctgtgatgaagaggaggatctgtttaacccatgccaggcgatcaagtgcaagcacgggaagtgcaggctttcaggtctggggcagccctactgtgaatgcagcagtggatacacgggggacagctgtgatcgagaaatctcttgtcgaggggaaaggataagagattattaccaaaagcagcagggctatgctgcttgccaaacaaccaagaaggtgtcccgattagagtgcagaggtgggtgtgcaggagggcagtgctgtggaccgctgaggagcaagcggcggaaatactctttcgaatgcactgacggctcctcctttgtggacgaggttgagaaagtggtgaagtgcggctgtacgaggtgtgtgtcctaaacacactcccggcagctctgtctttggaaaaggttgtatacttcttgaccatgtgggactaatgaatgcttcatagtggaaatatttgaaatatattgtaaaatacagaacagacttatttttattatgagaataaagactttttttctgcatttg

SEQ ID NO: 2237 - protein, 1529 aa, Homo sapien
MRGVGWQMLSLSLGLVLAILNKVAPQACPAQCSCSGSTVDCHGLALRSVPRNIPRNTERLDLNGNNITRITKTDFAGLRHLRVLQLMENKISTIERGAFQDLKELERLRLNRNHLQLFPELLFLGTAKLYRLDLSENQIQAIPRKAFRGAVDIKNLQLDYNQISCIEDGAFRALRDLEVLTLNNNNITRLSVASFNHMPKLRTFRLHSNNLYCDCHLAWLSDWLRQRPRVGLYTQCMGPSHLRGHNVAEVQKREFVCSGHQSFMAPSCSVLHCPAACTCSNNIVDCRGKGLTEIPTNLPETITEIRLEQNTIKVIPPGAFSPYKKLRRIDLSNNQISELAPDAFQGLRSLNSLVLYGNKITELPKSLFEGLFSLQLLLLNANKINCLRVDAFQDLHNLNLLSLYDNKLQTIAKGTFSPLRAIQTMHLAQNPFICDCHLKWLADYLHTNPIETSGARCTSPRRLANKRIGQIKSKKFRCSAKEQYFIPGTEDYRSKLSGDCFADLACPEKCRCEGTTVDCSNQKLNKIPEHIPQYTAELRLNNNEFTVLEATGIFKKLPQLRKINFSNNKITDIEEGAFEGASGVNEILLTSNRLENVQHKMFKGLESLKTLMLRSNRITCVGNDSFIGLSSVRLLSLYDNQITTVAPGAFDTLHSLSTLNLLANPFNCNCYLAWLGEWLRKKRIVTGNPRCQKPYFLKEIPIQDVAIQDFTCDDGNDDNSCSPLSRCPTECTCLDTVVRCSNKGLKVLPKGIPRDVTELYLDGNQFTLVPKELSNYKHLTLIDLSNNRISTLSNQSFSNMTQLLTLILSYNRLRCIPPRTFDGLKSLRLLSLHGNDISVVPEGAFNDLSALSHLAIGANPLYCDCNMQWLSDWVKSEYKEPGIARCAGPGEMADKLLLTTPSKKFTCQGPVDVNILAKCNPCLSNPCKNDGTCNSDPVDFYRCTCPYGFKGQDCDVPIHACISNPCKHGGTCHLKEGEEDGFWCICADGFEGENCEVNVDDCEDNDCENNSTCVDGINNYTCLCPPEYTGELCEEKLDFCAQDLNPCQHDSKCILTPKGFKCDCTPGYVGEHCDIDFDDCQDNKCKNGAHCTDAVNGYTCICPEGYSGLFCEFSPPMVLPRTSPCDNFDCQNGAQCIVRINEPICQCLPGYQGEKCEKLVSVNFINKESYLQIPSAKVRPQTNITLQIATDEDSGILLYKGDKDHIAVELYRGRVRASYDTGSHPASAIYSVETINDGNFHIVELLALDQSLSLSVDGGNPKIITNLSKQSTLNFDSPLYVGGMPGKSNVASLRQAPGQNGTSFHGCIRNLYINSELQDFQKVPMQTGILPGCEPCHKKVCAHGTCQPSSQAGFTCECQEGWMGPLCDQRTNDPCLGNKCVHGTCLPINAFSYSCKCLEGHGGVLCDEEEDLFNPCQAIKCKHGKCRLSGLGQPYCECSSGYTGDSCDREISCRGERIRDYYQKQQGYAACQTTKKVSRLECRGGCAGGQCCGPLRSKRRKYSFECTDGSSFVDEVEKVVKCGCTRCVS

SEQ ID NO: 2238 - DNA, 545 bp, Homo sapien
gtggcagctgggcctcaccccggcagcttttgcgtgaccccctgagtggggaaaggcaggctgttgcatggtggcctgagcgagcagaattcctccagggacaatggcgtctcttggccacatcttggttttctgtgtgggtctcctcaccatggccaaggcagaaagtccaaaggaacacgacccgttcacttacgactaccagtccctgcagatcggaggcctcgtcatcgccgggatcctcttcatcctgggcatcctcatcgtgctgagcagaagatgccggtgcaagttcaaccagcagcagaggactggggaacccgatgaagaggagggaactttccgcagctccatccgccgtctgtccacccgcaggcggtagaaacacctggagcgatggaatccggccaggactcccctggcacctgacatctcccacgctccacctgcgcgcccaccgccccctccgccgccccttccccagccctgcccccgcagactccccctgccgccaagacttccaataaaacgtgcgttcctctcga

SEQ ID NO: 2239 - protein, 92 aa, Homo sapien
MASLGHILVFCVGLLTMAKAESPKEHDPFTYDYQSLQIGGLVIAGILFILGILIVLSRRCRCKFNQQQRTGEPDEEEGTFRSSIRRLSTRRR

SEQ ID NO: 2240 - DNA, 836 bp, Homo sapien
ccggtgagtcgccggcgctgcagagggaggcggcactggtctcgacgtggggcggccagcgatgaagccgcccagttcaatacaaacaagtgagtttgactcatcagatgaagagcctattgaagatgaacagactccaattcatatatcatggctatctttgtcacgagtgaattgttctcagtttctcggtttatgtgctcttccaggttgtaaatttaaagatgttagaagaaatgtccaaaaagatacagaagaactaaagagctgtggtatacaagacatatttgttttctgcaccagaggggaactgtcaaaatatagagtcccaaaccttctggatctctaccagcaatgtggaattatcacccatcatcatccaatcgcagatggagggactcctgacatagccagctgctgtgaaataatggaagagcttacaacctgccttaaaaattaccgaaaaaccttaatacactgctatggaggacttgggagatcttgtcttgtagctgcttgtctcctactatacctgtctgacacaatatcaccagagcaagccatagacagcctgcgagacctaagaggatccggggcaatacagaccatcaagcaatacaattatcttcatgagtttcgggacaaattagctgcacatctatcatcaagagattcacaatcaagatctgtatcaagataaaggaattcaaatagcatatatatgaccatgtctgaaatgtcagttctctagcataatttgtattgaaatgaaaccaccagtgttatcaacttgaatgtaaatgtacatgtgcagatattcctaaagttttattgac

SEQ ID NO: 2241 - protein, 212 aa, Homo sapien
MKPPSSIQTSEFDSSDEEPIEDEQTPIHISWLSLSRVNCSQFLGLCALPGCKFKDVRRNVQKDTEELKSCGIQDIFVFCTRGELSKYRVPNLLDLYQQCGIITHHHPIADGGTPDIASCCEIMEELTTCLKNYRKTLIHCYGGLGRSCLVAACLLLYLSDTISPEQAIDSLRDLRGSGAIQTIKQYNYLHEFRDKLAAHLSSRDSQSRSVSR

SEQ ID NO: 2242 - DNA, 1007 bp, Homo sapien
atcatgtaccaggattatcccgggaactttgacacctcgtcccggggcagcagcggctctcctgcgcacgccgagtcctactccagcggcggcggcggccagcagaaattccgggtagatatgcctggctcaggcagtgcattcatccccaccatcaacgccatcacgaccagccaggacctgcagtggatggtgcagcccacagtgatcacctccatgtccaacccataccctcgctcgcacccctacagccccctgccgggcctggcctctgtccctggacacatggccctcccaagacctggcgtgatcaagaccattggcaccaccgtgggccgcaggaggagagatgagcagctgtctcctgaagaggaggagaagcgtcgcatccggcgggagaggaacaagctggctgcagccaagtgccggaaccgacgccgggagctgacagagaagctgcaggcggagacagaggagctggaggaggagaagtcaggcctgcagaaggagattgctgagctgcagaaggagaaggagaagctggagttcatgttggtggctcacggcccagtgtgcaagattagccccgaggagcgccgatcgcccccagcccctgggctgcagcccatgcgcagtgggggtggctcggtgggcgctgtagtggtgaaacaggagcccctggaagaggacagcccctcgtcctcgtcggcggggctggacaaggcccagcgctctgtcatcaagcccatcagcattgctgggggcttctacggtgaggagcccctgcacacccccatcgtggtgacctccacacctgctgtcactccgggcacctcgaacctcgtcttcacctatcctagcgtcctggagcaggagtcacccgcatctccctccgaatcctgctccaaggctcaccgcagaagcagtagcagcggggaccaatcatcagactccttgaactcccccactctgctggctctgtaacccagtgcacctccctccggagc

SEQ ID NO: 2243 - protein, 326 aa, Homo sapien; identical to SEQ ID NO: 1252

SEQ ID NO: 2244 - DNA, 1342 bp, Homo sapien
actcaaactcctctctctgggaaaacgcggtgcttgctcctcccggagtggccttggcagggtgttggagccctcggtctgccccgtccggtctctggggccaaggctgggtttccctcatgtatggcaagagctctactcgtgcggtgcttcttctccttggcatacagctcacagctctttggcctatagcagctgtggaaatttatacctcccgggtgctggaggctgttaatgggacagatgctcggttaaaatgcactttctccagctttgcccctgtgggtgatgctctaacagtgacctggaattttcgtcctctagacgggggacctgagcagtttgtattctactaccacatagatcccttccaacccatgagtgggcggtttaaggaccgggtgtcttgggatgggaatcctgagcggtacgatgcctccatccttctctggaaactgcagttcgacgacaatgggacatacacctgccaggtgaagaacccacctgatgttgatggggtgataggggagatccggctcagcgtcgtgcacactgtacgcttctctgagatccacttcctggctctggccattggctctgcctgtgcactgatgatcataatagtaattgtagtggtcctcttccagcattaccggaaaaagcgatgggccgaaagagctcataaagtggtggagataaaatcaaaagaagaggaaaggctcaaccaagagaaaaaggtctctgtttatttagaagacacagactaacaattttagatggaagctgagatgatttccaagaacaagaaccctagtatttcttgaagttaatggaaacttttctttggcttttccagttgtgacccgttttccaaccagttctgcagcatattagattctagacaagcaacacccctctggagccagcacagtgctcctccatatcaccagtcatacacagcctcattattaaggtcttatttaatttcagagtgtaaattttttcaagttgctcattaggttttataaacaagaagcctacatttttggccccttaaracacctaccttacagtgttatgaccttgtatacacatatattggtatcaaaggggataaaagcccaatttgtctgttacatttcctttcacgtatttcttttagcagcacttctgctactaaagttaatgtgtttactctctttccttcccacattctcaattaaaaggtgagctaagcctcctcggtgtttctgattaacagtaaatcctaaattcaaactgttaaatgacatttttatttttatgtctctccttaactatgagacacatcttgttttactga

SEQ ID NO: 2245 - protein, 215 aa, Homo sapien; identical to SEQ ID NO: 384

SEQ ID NO: 2246 - DNA, 911 bp, Homo sapien
cccacgcgtccggtcagagctggagggccgggcaccgcggccatggagggtcaacgctggctgccgctggaggccaatcccgaggtcaccaaccagtttcttaaacaattaggtctacatcctaactggcaattcgttgatgtatatggaatggatcctgaactccttagcatggtaccaagaccagtctgtgcagtcttacttctctttcctattacagaaaagtatgaagtattcagaacagaagaggaagaaaaaataaaatctcagggacaagatgttacatcatcagtatatttcatgaagcaaacaatcagcaatgcctgtggaacaattggactgattcatgctattgcaaacaataaagacaagatgcactttgaatctggatcaaccttgaaaaaattcctggaggaatctgtgtcaatgagccctgaagaacgagccagatacctggagaactatgatgccatccgagttactcatgagaccagtgcccatgaaggtcagactgaggcaccaagtatagatgagaaagtagatcttcattttattgcattagttcatgtagatgggcatctctatgaattagatgggcggaagccatttccaattaaccatggtgaaactagtgatgaaactttattagaggatgccatagaagtttgcaagaagtttatggagcgcgaccctgatgaactaagatttaatgcgattgctctttctgcagcatagcttgtcaataatggaaacaccaaaaactgtattatttgcaactaaattttctctgccatacactaactcaaaaattttgatattttcattaacttgatgattaaactttatgtgagttaaaaaaaaaaaaaaaaaaaaaaaaaaaaaaaaaaaaaaaaaaaaaaaaaaaaaaaaaa

SEQ ID NO: 2247 - protein, 230 aa, Homo sapien
MEGQRWLPLEANPEVTNQFLKQLGLHPNWQFVDVYGMDPELLSMVPRPVCAVLLLFPITEKYEVFRTEEEEKIKSQGQDVTSSVYFMKQTISNACGTIGLIHAIANNKDKMHFESGSTLKKFLEESVSMSPEERARYLENYDAIRVTHETSAHEGQTEAPSIDEKVDLHFIALVHVDGHLYELDGRKPFPINHGETSDETLLEDAIEVCKKFMERDPDELRFNAIALSAA

SEQ ID NO: 2248 - DNA, 5128 bp, Homo sapien
ccgagtgcctcgcagcccctcccgaggcgcagccgccagaccagtggagccggggcgcagggcgggggcggaggcgccggggcgggggatgcggggccgcggcgcagccccccggccctgagagcgaggacagcgccgcccggcccgcagccgtcgccgcttctccacctcggcccgtggagccggggcgtccgggcgtagccctcgctcgcctgggtcagggggtgcgcgtcgggggaggcagaagccatggatcccgggcagcagccgccgcctcaaccggccccccagggccaagggcagccgccttcgcagcccccgcaggggcagggcccgccgtccggacccgggcaaccggcacccgcggcgacccaggcggcgccgcaggcaccccccgccgggcatcagatcgtgcacgtccgcggggactcggagaccgacctggaggcgctcttcaacgccgtcatgaaccccaagacggccaacgtgccccagaccgtgcccatgaggctccggaagctgcccgactccttcttcaagccgccggagcccaaatcccactcccgacaggccagtactgatgcaggcactgcaggagccctgactccacagcatgttcgagctcattcctctccagcttctctgcagttgggagctgtttctcctgggacactgacccccactggagtagtctctggcccagcagctacacccacagctcagcatcttcgacagtcttcttttgagatacctgatgatgtacctctgccagcaggttgggagatggcaaagacatcttctggtcagagatacttcttaaatcacatcgatcagacaacaacatggcaggaccccaggaaggccatgctgtcccagatgaacgtcacagcccccaccagtccaccagtgcagcagaatatgatgaactcggcttcagccatgaaccagagaatcagtcagagtgctccagtgaaacagccaccacccctggctccccagagcccacagggaggcgtcatgggtggcagcaactccaaccagcagcaacagatgcgactgcagcaactgcagatggagaaggagaggctgcggctgaaacagcaagaactgcttcggcaggtgaggccacaggagttagccctgcgtagccagttaccaacactggagcaggatggtgggactcaaaatccagtgtcttctcccgggatgtctcaggaattgagaacaatgacgaccaatagctcagatcctttccttaacagtggcacctatcactctcgagatgagagtacagacagtggactaagcatgagcagctacagtgtccctcgaaccccagatgacttcctgaacagtgtggatgagatggatacaggtgatactatcaaccaaagcaccctgccctcacagcagaaccgtttcccagactaccttgaagccattcctgggacaaatgtggaccttggaacactggaaggagatggaatgaacatagaaggagaggagctgatgccaagtctgcaggaagctttgagttctgacatccttaatgacatggagtctgttttggctgccaccaagctagataaagaaagctttcttacatggttatagagccctcaggcagactgaattctaaatctgtgaaggatctaaggagacacatgcaccggaaatttccataagccagttgcagttttcaggctaatacagaaaaagatgaacaaacgtccagcaagatactttaatcctctattttgctcttccttgtccattgctgctgttaatgtattgctgacctctttcacagttggctctaaagaatcaaaagaaaaaaactttttatttcttttgctattaaaactactgttcattttgggggctgggggaagtgagcctgtttggatgatggatgccattccttttgcccagttaaatgttcaccaatcattttaactaaatactcagacttagaagtcagatgcttcatgtcacagcatttagtttgttcaacagttgtttcttcagcttcctttgtccagtggaaaaacatgatttactggtctgacaagccaaaaatgttatatctgatattaaatacttaatgctgatttgaagagatagctgaaaccaaggctgaagactgttttactttcagtattttcttttcctcctagtgctatcattagtcacataatgaccttgattttattttaggagcttataaggcatgagacaatttccatataaatatattaattattgccacatactctaatatagattttggtggataattttgtgggtgtgcattttgttctgttttgttgggttttttgttttttttgtttttggcagggtcggtgggggggttggttggttggttggttttgtcggaacctaggcaaatgaccatattagtgaatctgttaatagttgtagcttgggatggttattgtagttgttttggtaaaatcttcatttcctggttttttttaccaccttatttaaatctcgattatctgctctctcttttatatacatacacacacccaaacataacatttataatagtgtggtagtggaatgtatccttttttaggtttccctgctttccagttaatttttaaaatggtagcgctttgtatgcatttagaatacatgactagtagtttatatttcactggtagtttaaatctggttggggcagtctgcagatgtttgaagtagtttagtgttctagaaagagctattactgtggatagtgcctaggggagtgctccacgccctctgggcatacggtagatattatctgatgaattggaaaggagcaaaccagaaatggctttattttctcccttggactaatttttaagtctcgattggaattcagtgagtaggttcataatgtgcatgacagaaataagctttatagtggtttaccttcatttagctttggaagttttctttgccttagttttggaagtaaattctagtttgtagttctcatttgtaatgaacacattaacgactagattaaaatattgccttcaagattgttcttacttacaagacttgctcctacttctatgctgaaaattgaccctggatagaatactataaggttttgagttagctggaaaagtgatcagattaataaatgtatattggtagttgaatttagcaaagaaatagagataatcatgattatacctttatttttacaggaagagatgatgtaactagagtatgtgtctacaggagtaataatggtttccaaagagtattttttaaaggaacaaaacgagcatgaattaactcttcaatataagctatgaagtaatagttggttgtgaattaaagtggcaccagctagcacctctgtgttttaagggtctttcaatgtttctagaataagcccttattttcaagggttcataacaggcataaaatctcttctcctggcaaaagctgctatgaaaagcctcagcttgggaagatagatttttttccccccaattacaaaatctaagtattttggcccttcaatttggaggagggcaaaagttggaagtaagaagttttattttaagtactttcagtgctcaaaaaaatgcaatcactgtgttgtatataatagttcataggttgatcactcataataattgactctaaggcttttattaagaaaacagcagaaagattaaatcttgaattaagtctggggggaaatggccactgcagatggagttttagagtagtaatgaaattctacctagaatgcaaaattgggtatatgaattacatagcatgttgttgggattttttttaatgtgcagaagatcaaagctacttggaaggagtgcctataatttgccagtagccacagattaagattatatcttatatatcagcagattagctttagcttagggggagggtgggaaagtttggggggggggttgtgaagatttagggggaccttgatagagaactttataaacttctttctctttaataaagacttgtcttacaccgtgctgccattaaaggcagctgttctagagtttcagtcacctaagtacacccacaaaacaatatgaatatggagatcttcctttacccctcaactttaatttgcccagttatacctcagtgttgtagcagtactgtgatacctggcacagtgctttgatcttacgatgccctctgtactgacctgaaggagacctaagagtcctttccctttttgagtttgaatcatagccttgatgtggtctcttgttttatgtccttgttcctaatgtaaaagtgcttaactgcttcttggttgtattgggtagcattgggataagattttaactgggtattcttgaattgcttttacaataaaccaattttataatctttaaatttatcaactttttacatttgtgttattttcagtcagggcttcttagatctacttatggttgatggagcacattgatttggagtttcagatcttccaaagcactatttgttgtaataacttttctaaatgtagtgcctttaaaggaaaaatgaacacagggaagtgactttgctacaaataatgttgctgtgttaagtattcatattaaatacatgccttctatatggaacatggcagaaagactgaaaaataacagtaattaattgtgtaattcagaattcataccaatcagtgttgaaactcaaacattgcaaaagtgggtggcaatattcagtgcttaacacttttctagcgttggtacatctgagaaatgagtgctcaggtggattttatcctcgcaagcatgttgttataagaattgtgggtgtgcctatcataacaattgttttctgtatcttgaaaaagtattctccacattttaaatgttttatattagagaattctttaatgcacacttgtcaaatatatatatatagtaccaatgttacctttttattttttgttttagatgtaagagcatgctcatatgttaggtacttacataaattgttacattattttttcttatgtaatacctttttgtttgtttatgtggttcaaatatattctttccttaaaaaaaaaaaaaaaaaaaaaaaaaaaaaaaaaaaaaaa

SEQ ID NO: 2249 - protein, 454 aa, Homo sapien
MDPGQQPPPQPAPQGQGQPPSQPPQGQGPPSGPGQPAPAATQAAPQAPPAGHQIVHVRGDSETDLEALFNAVMNPKTANVPQTVPMRLRKLPDSFFKPPEPKSHSRQASTDAGTAGALTPQHVRAHSSPASLQLGAVSPGTLTPTGVVSGPAATPTAQHLRQSSFEIPDDVPLPAGWEMAKTSSGQRYFLNHIDQTTTWQDPRKAMLSQMNVTAPTSPPVQQNMMNSASAMNQRISQSAPVKQPPPLAPQSPQGGVMGGSNSNQQQQMRLQQLQMEKERLRLKQQELLRQVRPQELALRSQLPTLEQDGGTQNPVSSPGMSQELRTMTTNSSDPFLNSGTYHSRDESTDSGLSMSSYSVPRTPDDFLNSVDEMDTGDTINQSTLPSQQNRFPDYLEAIPGTNVDLGTLEGDGMNIEGEELMPSLQEALSSDILNDMESVLAATKLDKESFLTWL

SEQ ID NO: 2250 - DNA, 3804 bp, Homo sapien
taaagtcatcaaaacaacgttatatcctgtgtgaaatgctgcagtcaggatgccttgtggtttgagtgccttgatcatgtgccctaaggggatggtggcggtggtggtggccgtggatgacggagactctcaggccttggcaggtgcgtctttcagttcccctcacacttcgggttcctcggggaggaggggctggaaccctagcccatcgtcaggacaaagatgctcaggctgctcttggctctcaacttattcccttcaattcaagtaacaggaaacaagattttggtgaagcagtcgcccatgcttgtagcgtacgacaatgcggtcaaccttagctgcaagtattcctacaatctcttctcaagggagttccgggcatcccttcacaaaggactggatagtgctgtggaagtctgtgttgtatatgggaattactcccagcagcttcaggtttactcaaaaacggggttcaactgtgatgggaaattgggcaatgaatcagtgacattctacctccagaatttgtatgttaaccaaacagatatttacttctgcaaaattgaagttatgtatcctcctccttacctagacaatgagaagagcaatggaaccattatccatgtgaaagggaaacacctttgtccaagtcccctatttcccggaccttctaagcccttttgggtgctggtggtggttggtggagtcctggcttgctatagcttgctagtaacagtggcctttattattttctgggtgaggagtaagaggagcaggctcctgcacagtgactacatgaacatgactccccgccgccccgggcccacccgcaagcattaccagccctatgccccaccacgcgacttcgcagcctatcgctcctgacacggacgcctatccagaagccagccggctggcagcccccatctgctcaatatcactgctctggataggaaatgaccgccatctccagccggccacctcaggcccctgttgggccaccaatgccaatttttctcgagtgactagaccaaatatcaagatcattttgagactctgaaatgaagtaaaagagatttcctgtgacaggccaagtcttacagtgccatggcccacattccaacttaccatgtacttagtgacttgactgagaagttagggtagaaaacaaaaagggagtggattctgggagcctcttccctttctcactcacctgcacatctcagtcaagcaaagtgtggtatccacagacattttagttgcagaagaaaggctaggaaatcattccttttggttaaatgggtgtttaatcttttggttagtgggttaaacggggtaagttagagtagggggagggataggaagacatatttaaaaaccattaaaacactgtctcccactcatgaaatgagccacgtagttcctatttaatgctgttttcctttagtttagaaatacatagacattgtcttttatgaattctgatcatatttagtcattttgaccaaatgagggatttggtcaaatgagggattccctcaaagcaatatcaggtaaaccaagttgctttcctcactccctgtcatgagacttcagtgttaatgttcacaatatactttcgaaagaataaaatagttctcctacatgaagaaagaatatgtcaggaaataaggtcactttatgtcaaaattatttgagtactatgggacctggcgcagtggctcatgcttgtaatcccagcactttgggaggccgaggtgggcagatcacttgagatcaggaccagcctggtcaagatggtgaaactccgtctgtactaaaaatacaaaatttagcttggcctggtggcaggcacctgtaatcccagctgcccaggaggctgaggcatgagaatcgcttgaacctggcaggcggaggttgcagtgagccgagatagtgccacagctctccagcctgggcgacagagtgagactccatctcaaacaacaacaacaacaacaacaacaacaacaaaccacaaaattatttgagtactgtgaaggattatttgtctaacagttcattccaatcagaccaggtaggagctttcctgtttcatatgtttcagggttgcacagttggtctctttaatgtcggtgtggagatccaaagtgggttgtggaaagagcgtccataggagaagtgagaatactgtgaaaagggatgttagcattcattagagtatgaggatgagtcccaagaaggttctttggaaggaggacgaatagaatggagtaatgaaattcttgccatgtgctgaggagatagccagcattaggtgacaatcttccagaagtggtcaggcagaaggtgccctggtgagagctcctttacagggactttatgtggtttagggctcagagctccaaaactctgggctcagctgctcctgtaccttggaggtccattcacatgggaaagtattttggaatgtgtcttttgaagagagcatcagagttcttaagggactgggtaaggcctgaccctgaaatgaccatggatatttttctacctacagtttgagtcaactagaatatgcctggggaccttgaagaatgcccttcagtggccctcaccatttgttcatgcttcagttaattcaggtgttgaaggagcttaggttttagaggcacgtagacttggttcaagtctcgttagtagttgaatagcctcaggcaagtcactgcccacctaagatgatggttcttcaactataaatggagataatggttacaaatgtctcttcctatagtataatctccataagggcatggcccaagtctgtctttgactctgcctatccctgacgtttagtagcatgcccgacatacaatgttagctattggtattattgccatatagataaattatgtataaaaattaaactgggcaatagcctaagaaggggggaatattgtaacacaaatttaaacccactacgcagggatgaggtgctataatatgaggaccttttaacttccatcattttcctgtttcttgaaatagtttatcttgtaatgaaatataaggcacctcccacttttatgtatagaaagaggtcttttaatttttttttaatgtgagaaggaagggaggagtaggaatcttgagattccatatcgaaaatactgtactttggttgatttttaagtgggcttccattccatggatttaatcagtcccaagaagatcaaactcagcagtacttgggtgctgaagaactgttggatttaccctggcacgtgtgccacttgcccagcttcttgggcacacagagttcttcaatccaagttatcagattgtatttgaaaatgacagagctggagagttttttgaaatggcagtggcaaataaataaatacttttttttaaatggaaagacttgatctatggtaataaatgattttgttttctgactggaaaaataggcctactaaagatgaatcacacttgagatgtttcttactcactctgcacagaaacaaagaagaaatgttatacagggaagtccgttttcactattagtatgaaccaagaaatggttcaaaaacagtggtaggagcaatgctttcatagtttcagatatggtagttatgaagaaaacaatgtcatttgctgctattattgtaagagtcttataattaatggtactcctataatttttgattgtgagctcacctatttgggttaagcatgccaatttaaagagaccaagtgtatgtacattatgttctacatattcagtgataaaattactaaactact

SEQ ID NO: 2251 - protein, 220 aa, Homo sapien
MLRLLLALNLFPSIQVTGNKILVKQSPMLVAYDNAVNLSCKYSYNLFSREFRASLHKGLDSAVEVCVVYGNYSQQLQVYSKTGFNCDGKLGNESVTFYLQNLYVNQTDIYFCKIEVMYPPPYLDNEKSNGTIIHVKGKHLCPSPLFPGPSKPFWVLVVVGGVLACYSLLVTVAFIIFWVRSKRSRLLHSDYMNMTPRRPGPTRKHYQPYAPPRDFAAYRS

SEQ ID NO: 2252 - DNA, 1453 bp, Homo sapien
ggctgttggcggcggttggctcggcgcgggagtcggctgcacgtgcgggcgggggcgatgcgtcactgatcggaggaacgagaatgaatatgactcaagcccgggttctggtggctgcagtggtggggttggtggctgtcctgctctacgcctccatccacaagattgaggagggccatctggctgtgtactacaggggaggagctttactaactagccccagtggaccaggctatcatatcatgttgcctttcattactacgttcagatctgtgcagacaacactacaaactgatgaagttaaaaatgtgccttgtggaacaagtggtggggtcatgatctatattgaccgaatagaagtggttaatatgttggctccttatgcagtgtttgatatcgtgaggaactatactgcagattatgacaagaccttaatcttcaataaaatccaccatgagctgaaccagttctgcagtgcccacacacttcaggaagtttacattgaattgtttgatcaaatagatgaaaacctgaagcaagctctgcagaaagacttaaacctcatggccccaggtctcactatacaggctgtgcgtgttacaaaacccaaaatcccagaagccataagaagaaattttgagttaatggaggctgagaagacaaaactccttatagctgcacagaaacaaaaggttgtggaaaaagaagctgagacagagaggaaaaaggcagttatagaagcagagaagattgcacaagtggcaaaaattcggtttcagcagaaagtgatggaaaaagaaactgaaaagcgcatttctgaaatcgaagatgctgcattcctggcccgagagaaagcgaaagcagatgctgaatattatgctgcacacaaatatgccacctcaaacaagcacaagttgaccccggaatatctggagctcaaaaagtaccaggccattgcttctaacagtaagatctattttggcagcaacatccctaacatgttcgtggactcctcatgtgctttgaaatattcagatattaggactggaagagaaagctcactcccctctaaggaggctcttgaaccctctggagagaacgtcatccaaaacaaagagagcacaggttgatgcaagaggtggaaatgttctccatatcaagatgtggcccaaggggttaagtgggaacaatcattatacggactcttcagatttacagagaacttacacttcatctgttccacctctcctgcgatagtcctgggtgctccactgattggaggatagagccagctgtctgacacacaaatggtcttttcagccacagtcttatcaagtatcctatatgtattcctttctaaactgctactcatgaatgaggaaagtctgatgctaagatactgcctgcactggaatgttaaacactaaatatataacaagctgtgttttcgtaa

SEQ ID NO: 2253 - protein, 346 aa, Homo sapien
MTQARVLVAAVVGLVAVLLYASIHKIEEGHLAVYYRGGALLTSPSGPGYHIMLPFITTFRSVQTTLQTDEVKNVPCGTSGGVMIYIDRIEVVNMLAPYAVFDIVRNYTADYDKTLIFNKIHHELNQFCSAHTLQEVYIELFDQIDENLKQALQKDLNLMAPGLTIQAVRVTKPKIPEAIRRNFELMEAEKTKLLIAAQKQKVVEKEAETERKKAVIEAEKIAQVAKIRFQQKVMEKETEKRISEIEDAAFLAREKAKADAEYYAAHKYATSNKHKLTPEYLELKKYQAIASNSKIYFGSNIPNMFVDSSCALKYSDIRTGRESSLPSKEALEPSGENVIQNKESTG

SEQ ID NO: 2254 - DNA, 2654 bp, Homo sapien
agccggagctggagccgaggcggcggcgggacgcggccggccggacaaatttcctgctaggctgcggacgagcgggcggcaggagccggcgcgagcggcttcaggaacccacggcctctgcgcgtccccgcgacccttcttcgcgcccggcgaagacagccgggcgccccggagggcggcgggcaggcgcccgggagatgcggagcctccgctgcagcgcgatctgcgcgaccagaccggcccccccgagactatagccttcactttccctcggtccaccatggagcccttgtgtccactcctgctggtgggttttagcttgccgctcgccagggctctcaggggcaacgagaccactgccgacagcaacgagacaaccacgacctcaggccctccggacccgggcgcctcccagccgctgctggcctggctgctactgccgctgctgctcctcctcctcgtgctccttctcgccgcctacttcttcaggttcaggaagcagaggaaagctgtggtcagcaccagcgacaagaagatgcccaacggaatcttggaggagcaagagcagcaaagggtgatgctgctcagcaggtcaccctcagggcccaagaagtattttcccatccccgtggagcacctggaggaggagatccgtatcagatccgccgacgactgcaagcagtttcgggaggagttcaactcattgccatctggacacatacaaggaacttttgaactggcaaataaagaagaaaacagagaaaaaaacagatatcccaacatccttcccaatgaccattctagggtgattctgagccaactggatggaattccctgttcagactacatcaatgcttcctacatagatggttacaaagagaagaataaattcatagcagctcaaggtcccaaacaggaaacggttaacgacttctggagaatggtctgggagcaaaagtctgcgaccatcgtcatgttaacaaacttgaaagaaaggaaagaggaaaagtgccatcagtactggcccgaccaaggctgctggacctatggaaacatccgggtgtgcgtggaggactgcgtggttttggtcgactacaccatccggaagttctgcatacagccacagctccccgacggctgcaaagcccccaggctggtctcacagctgcacttcaccagctggcccgacttcggagtgccttttacccccattgggatgctgaagttcctcaagaaagtaaagacgctcaaccccgtgcacgctgggcccatcgtggtccactgtagcgcgggcgtgggccggacgggcaccttcattgtgatcgatgccatgatggccatgatgcacgcggagcagaaggtggatgtgtttgaatttgtgtctcgaatccgtaatcagcgccctcagatggttcaaacggatatgcagtacacgttcatctaccaagccttactcgagtactacctctacggggacacagagctggacgtgtcctccctggagaagcacctgcagaccatgcacggcaccaccacccacttcgacaagatcgggctggaggaggagttcaggaaattgacaaatgtccggatcatgaaggagaacatgaggacgggcaacttgccggcaaacatgaagaaggccagggtcatccagatcatcccgtatgacttcaaccgagtgatcctttccatgaaaaggggtcaagaatacacagactacatcaacgcatccttcatagacggctaccgacagaaggactatttcatcgccacccaggggccactggcacacacggttgaggacttctggaggatgatctgggaatggaaatcccacactatcgtgatgctgacggaggtgcaggagagagagcaggataaatgctaccagtattggccaaccgagggctcagttactcatggagaaataacgattgagataaagaatgataccctttcagaagccatcagtatacgagactttctggtcactctcaatcagccccaggcccgccaggaggagcaggtccgagtagtgcgccagtttcacttccacggctggcctgagatcgggattcccgccgagggcaaaggcatgattgacctcatcgcagccgtgcagaagcagcagcagcagacaggcaaccaccccatcaccgtgcactgcagtgccggagctgggcgaacaggtacattcatagccctcagcaacattttggagcgagtaaaagccgagggacttttagatgtatttcaagctgtgaagagtttacgacttcagagaccacatatggtgcaaaccctggaacagtatgaattctgctacaaagtggtacaagattttattgatatattttctgattatgctaatttcaaatgaagattcctgccttaaaatattttttaatttaatggtcagtatattttgtaaaaatcatgttaatttatttcatagttgacattaatatcttccctaatttctttgtatatattttgttatgccttaaaggccacctgctatacagttgttaaatcttaaatatgctttttaaaaattggaataatgtattaaggtcaaataatatcccataaaatatatatttctgctaatattagtaaatatcttaatttttaaaaaaaaaaaaaaaaaa

SEQ ID NO: 2255 - protein, 700 aa, Homo sapien
MEPLCPLLLVGFSLPLARALRGNETTADSNETTTTSGPPDPGASQPLLAWLLLPLLLLLLVLLLAAYFFRFRKQRKAVVSTSDKKMPNGILEEQEQQRVMLLSRSPSGPKKYFPIPVEHLEEEIRIRSADDCKQFREEFNSLPSGHIQGTFELANKEENREKNRYPNILPNDHSRVILSQLDGIPCSDYINASYIDGYKEKNKFIAAQGPKQETVNDFWRMVWEQKSATIVMLTNLKERKEEKCHQYWPDQGCWTYGNIRVCVEDCVVLVDYTIRKFCIQPQLPDGCKAPRLVSQLHFTSWPDFGVPFTPIGMLKFLKKVKTLNPVHAGPIVVHCSAGVGRTGTFIVIDAMMAMMHAEQKVDVFEFVSRIRNQRPQMVQTDMQYTFIYQALLEYYLYGDTELDVSSLEKHLQTMHGTTTHFDKIGLEEEFRKLTNVRIMKENMRTGNLPANMKKARVIQIIPYDFNRVILSMKRGQEYTDYINASFIDGYRQKDYFIATQGPLAHTVEDFWRMIWEWKSHTIVMLTEVQEREQDKCYQYWPTEGSVTHGEITIEIKNDTLSEAISIRDFLVTLNQPQARQEEQVRVVRQFHFHGWPEIGIPAEGKGMIDLIAAVQKQQQQTGNHPITVHCSAGAGRTGTFIALSNILERVKAEGLLDVFQAVKSLRLQRPHMVQTLEQYEFCYKVVQDFIDIFSDYANFK

SEQ ID NO: 2256 - DNA, 2856 bp, Homo sapien
tagtcgcgggtccccgagtgagcacgccagggagcaggagaccaaacgacgggggtcggagtcagagtcgcagtgggagtccccggaccggagcacgagcctgagcgggagagcgccgctcgcacgcccgtcgccacccgcgtacccggcgcagccagagccaccagcgcagcgctgccatggagcccagcagcaagaagctgacgggtcgcctcatgctggctgtgggaggagcagtgcttggctccctgcagtttggctacaacactggagtcatcaatgccccccagaaggtgatcgaggagttctacaaccagacatgggtccaccgctatggggagagcatcctgcccaccacgctcaccacgctctggtccctctcagtggccatcttttctgttgggggcatgattggctccttctctgtgggccttttcgttaaccgctttggccggcggaattcaatgctgatgatgaacctgctggccttcgtgtccgccgtgctcatgggcttctcgaaactgggcaagtcctttgagatgctgatcctgggccgcttcatcatcggtgtgtactgcggcctgaccacaggcttcgtgcccatgtatgtgggtgaagtgtcacccacagcctttcgtggggccctgggcaccctgcaccagctgggcatcgtcgtcggcatcctcatcgcccaggtgttcggcctggactccatcatgggcaacaaggacctgtggcccctgctgctgagcatcatcttcatcccggccctgctgcagtgcatcgtgctgcccttctgccccgagagtccccgcttcctgctcatcaaccgcaacgaggagaaccgggccaagagtgtgctaaagaagctgcgcgggacagctgacgtgacccatgacctgcaggagatgaaggaagagagtcggcagatgatgcgggagaagaaggtcaccatcctggagctgttccgctcccccgcctaccgccagcccatcctcatcgctgtggtgctgcagctgtcccagcagctgtctggcatcaacgctgtcttctattactccacgagcatcttcgagaaggcgggggtgcagcagcctgtgtatgccaccattggctccggtatcgtcaacacggccttcactgtcgtgtcgctgtttgtggtggagcgagcaggccggcggaccctgcacctcataggcctcgctggcatggcgggttgtgccatactcatgaccatcgcgctagcactgctggagcagctaccctggatgtcctatctgagcatcgtggccatctttggctttgtggccttctttgaagtgggtcctggccccatcccatggttcatcgtggctgaactcttcagccagggtccacgtccagctgccattgccgttgcaggcttctccaactggacctcaaatttcattgtgggcatgtgcttccagtatgtggagcaactgtgtggtccctacgtcttcatcatcttcactgtgctcctggttctgttcttcatcttcacctacttcaaagttcctgagactaaaggccggaccttcgatgagatcgcttccggcttccggcaggggggagccagccaaagtgataagacacccgaggagctgttccatcccctgggggctgattcccaagtgtgagtcgccccagatcaccagcccggcctgctcccagcagccctaaggatctctcaggagcacaggcagctggatgagacttccaaacctgacagatgtcagccgagccgggcctggggctcctttctccagccagcaatgatgtccagaagaatattcaggacttaacggctccaggattttaacaaaagcaagactgttgctcaaatctattcagacaagcaacaggttttataatttttttattactgattttgttatttttatatcagcctgagtctcctgtgcccacatcccaggcttcaccctgaatggttccatgcctgagggtggagactaagccctgtcgagacacttgccttcttcacccagctaatctgtagggctggacctatgtcctaaggacacactaatcgaactatgaactacaaagcttctatcccaggaggtggctatggccacccgttctgctggcctggatctccccactctaggggtcaggctccattaggatttgccccttcccatctcttcctacccaaccactcaaattaatctttctttacctgagaccagttgggagcactggagtgcagggaggagaggggaagggccagtctgggctgccgggttctagtctcctttgcactgagggccacactattaccatgagaagagggcctgtgggagcctgcaaactcactgctcaagaagacatggagactcctgccctgttgtgtatagatgcaagatatttatatatatttttggttgtcaatattaaatacagacactaagttatagtatatctggacaagccaacttgtaaatacaccacctcactcctgttacttacctaaacagatataaatggctggtttttagaaacatggttttgaaatgcttgtggattgagggtaggaggtttggatgggagtgagacagaagtaagtggggttgcaaccactgcaacggcttagacttcgactcaggatccagtcccttacacgtacctctcatcagtgtcctcttgctcaaaaatctgtttgatccctgttacccagagaatatatacattctttatcttgacattcaaggcatttctatcacatatttgatagttggtgttcaaaaaaacactagttttgtgccagccgtgatgctcaggcttgaaatcgcattattttgaatgtgaagggaa

SEQ ID NO: 2257 - protein, 492 aa, Homo sapien
MEPSSKKLTGRLMLAVGGAVLGSLQFGYNTGVINAPQKVIEEFYNQTWVHRYGESILPTTLTTLWSLSVAIFSVGGMIGSFSVGLFVNRFGRRNSMLMMNLLAFVSAVLMGFSKLGKSFEMLILGRFIIGVYCGLTTGFVPMYVGEVSPTAFRGALGTLHQLGIVVGILIAQVFGLDSIMGNKDLWPLLLSIIFIPALLQCIVLPFCPESPRFLLINRNEENRAKSVLKKLRGTADVTHDLQEMKEESRQMMREKKVTILELFRSPAYRQPILIAVVLQLSQQLSGINAVFYYSTSIFEKAGVQQPVYATIGSGIVNTAFTVVSLFVVERAGRRTLHLIGLAGMAGCAILMTIALALLEQLPWMSYLSIVAIFGFVAFFEVGPGPIPWFIVAELFSQGPRPAAIAVAGFSNWTSNFIVGMCFQYVEQLCGPYVFIIFTVLLVLFFIFTYFKVPETKGRTFDEIASGFRQGGASQSDKTPEELFHPLGADSQV

SEQ ID NO: 2258 - DNA, 817 bp, Homo sapien
agtcctgcgtccgggccccgaggcgcagcagggcaccaggtggagcaccagctacgcgtggcgcagcgcagcgtccctagcaccgagcctcccgcagccgccgagatgctgcgaacagagagctgccgccccaggtcgcccgccggacaggtggccgcggcgtccccgctcctgctgctgctgctgctgctcgcctggtgcgcgggcgcctgccgaggtgctccaatattacctcaaggattacagcctgaacaacagctacagttgtggaatgagatagatgatacttgttcgtcttttctgtccattgattctcagcctcaggcatccaacgcactggaggagctttgctttatgattatgggaatgctaccaaagcctcaggaacaagatgaaaaagataatactaaaaggttcttatttcattattcgaagacacagaagttgggcaagtcaaatgttgtgtcgtcagttgtgcatccgttgctgcagctcgttcctcacctgcatgagagaagaatgaagagattcagagtggacgaagaattccaaagtccctttgcaagtcaaagtcgaggatattttttattcaggccacggaatggaagaaggtcagcagggttcatttaaaatggatgccagctaattttccacagagcaatgctatggaatacaaaatgtactgacattttgttttcttctgaaaaaaatccttgctaaatgtactctgttgaaaatccctgtgttgtcaatgttctcagttgtaacaatgttgtaaatgttcaatttgttgaaaattaaaaaatctaaaaataaa

SEQ ID NO: 2259 - protein, 174 aa, Homo sapien
MLRTESCRPRSPAGQVAAASPLLLLLLLLAWCAGACRGAPILPQGLQPEQQLQLWNEIDDTCSSFLSIDSQPQASNALEELCFMIMGMLPKPQEQDEKDNTKRFLFHYSKTQKLGKSNVVSSVVHPLLQLVPHLHERRMKRFRVDEEFQSPFASQSRGYFLFRPRNGRRSAGFI

SEQ ID NO: 2260 - DNA, 2313 bp, Homo sapien
acgagcatccggactagttattgagcatctgcctctcatatcaccagtggccatctgaggtgtttccctggctctgaaggggtaggtgtgatggccaggtgcttcagcctggtgttgcttctcacttccatctggactacgaggctcctggtccaaggctctttgcgtgcagaagagctttccatccaggtgtcatgcagaattatggggatcacccttgtgagcaaaaaggcgaaccagcagctgaatttcacagaagctaaggaggcctgtaggctgctgggactaagtttggccggcaaggaccaagttgacacagccttgaaagctagctttgaaacttgcagctatggctgggttggagatggattcgtggtcatctctaggattagcccaaaccccaagtgtgggaaaaatggggtgggtgtcctgatttggaaggttccagtgagccgacagtttggagcctattgttacaactcatctgatacttggactaactcgcgcattccagaaattatcaccaccaaagatcccatattcaacactcaaactgcaacacaaacaacagaatttattgtcagtgacagtacctactcggtggcatccccttactctacaatacctgcccctactactactcctcctgctccagcttccacttctattccacggagaaaaaaattgatttgtgtcacagaagtttttatggaaactagcaccatgtctacagaaactgaaccatttgttgaaaataaagcagcattcaagaatgaagctgctgggtttggaggtgtccccacggctctgctagtgcttgctctcctcttctttggtgctgcagctggtcttggattttgctatgtcaaaaggtatgtgaaggccttcccttttacaaacaagaatcagcagaaggaaatgatcgaaaccaaagtagtaaaggaggagaaggccaatgatagcaaccctaatgaggaatcaaagaaaactgataaaaacccagaagagtccaagagtccaagcaaaactaccgtgcgatgcctggaagctgaagtttagatgagacagaaatgaggagacacacctgaggctggtttctttcatgctccttaccctgccccagctggggaaatcaaaagggccaaagaaccaaagaagaaagtccacccttggttcctaactggaatcagctcaggactgccattggactatggagtgcaccaaagagaatgcccttctccttattgtaaccctgtctggatcctatcctcctacctccaaagcttcccacggcctttctagcctggctatgtcctaataatatcccactgggagaaaggagttttgcaaagtgcaaggacctaaaacatctcatcagtatccagtggtaaaaaggcctcctggctgtctgaggctaggtgggttgaaagccaaggagtcactgagaccaaggctttctctactgattccgcagctcagaccctttcttcagctctgaaagagaaacacgtatcccacctgacatgtccttctgagcccggtaagagcaaaagaatggcagaaaagtttagcccctgaaagccatggagattctcataacttgagacctaatctctgtaaagctaaaataaagaaatagaacaaggctgaggatacgacagtacactgtcagcagggactgtaaacacagacagggtccaagtgttttctctgaacacattgagttggaatcactgtttagaacacacacacttactttttctggtctctaccactgctgatattttctctaggaaatatacttttacaagtaacaaaaataaaaactcttataaatttctatttttatctgagttacagaaatgattactaaggaagattactcagtaatttgtttaaaaagtaataaaattcaacaaacatttgctgaatagctactatatgtcaagtgctgtgcaaggtattacactctgtaattgaatattattcctcaaaaaattgcacatagtagaacgctatctgggaagctatttttttcagttttgatatttctagcttatctacttccaaactaatttttatttttgctgagactaatcttattcattttctctaatatggcaaccattataaccttaatttattattaacatacctaagaagtacattgttacctctatataccaaagcacattttaaaagtgccattaacaaatgtatcactagccctcctttttccaacaagaagggactgagagatgcagaaatatttgtgacaaaaaattaaagcatttagaaaaaaaaaaaaaaaaa

SEQ ID NO: 2261 - protein, 322 aa, Homo sapien
MARCFSLVLLLTSIWTTRLLVQGSLRAEELSIQVSCRIMGITLVSKKANQQLNFTEAKEACRLLGLSLAGKDQVDTALKASFETCSYGWVGDGFVVISRISPNPKCGKNGVGVLIWKVPVSRQFGAYCYNSSDTWTNSRIPEIITTKDPIFNTQTATQTTEFIVSDSTYSVASPYSTIPAPTTTPPAPASTSIPRRKKLICVTEVFMETSTMSTETEPFVENKAAFKNEAAGFGGVPTALLVLALLFFGAAAGLGFCYVKRYVKAFPFTNKNQQKEMIETKVVKEEKANDSNPNEESKKTDKNPEESKSPSKTTVRCLEAEV

SEQ ID NO: 2262 - DNA, 786 bp, Homo sapien
atggattgggggacgctgcacactttcatcgggggtgtcaacaaacactccaccagcatcgggaaggtgtggatcacagtcatctttattttccgagtcatgatcctagtggtggctgcccaggaagtgtggggtgacgagcaagaggacttcgtctgcaacacactgcaaccgggatgcaaaaatgtgtgctatgaccactttttcccggtgtcccacatccggctgtgggccctccagctgatcttcgtctccaccccagcgctgctggtggccatgcatgtggcctactacaggcacgaaaccactcgcaagttcaggcgaggagagaagaggaatgatttcaaagacatagaggacattaaaaagcacaaggttcggatagaggggtcgctgtggtggacgtacaccagcagcatctttttccgaatcatctttgaagcagcctttatgtatgtgttttacttcctttacaatgggtaccacctgccctgggtgttgaaatgtgggattgacccctgccccaaccttgttgactgctttatttctaggccaacagagaagaccgtgtttaccatttttatgatttctgcgtctgtgatttgcatgctgcttaacgtggcagagttgtgctacctgctgctgaaagtgtgttttaggagatcaaagagagcacagacgcaaaaaaatcaccccaatcatgccctaaaggagagtaagcagaatgaaatgaatgagctgatttcagatagtggtcaaaatgcaatcacaggtttcccaagctaa

SEQ ID NO: 2263 - protein, 261 aa, Homo sapien
MDWGTLHTFIGGVNKHSTSIGKVWITVIFIFRVMILVVAAQEVWGDEQEDFVCNTLQPGCKNVCYDHFFPVSHIRLWALQLIFVSTPALLVAMHVAYYRHETTRKFRRGEKRNDFKDIEDIKKHKVRIEGSLWWTYTSSIFFRIIFEAAFMYVFYFLYNGYHLPWVLKCGIDPCPNLVDCFISRPTEKTVFTIFMISASVICMLLNVAELCYLLLKVCFRRSKRAQTQKNHPNHALKESKQNEMNELISDSGQNAITGFPS

SEQ ID NO: 2264 - DNA, 2292 bp, Homo sapien
ccatgggttccccttcagcctgtccatacagagtgtgcattccctggcaggggctcctgctcacagcctcgcttttaaccttctggaacctgccaaacagtgcccagaccaatattgatgtcgtgccgttcaatgtcgcagaagggaaggaggtccttctagtagtccataatgagtcccagaatctttatggctacaactggtacaaaggggaaagggtgcatgccaactatcgaattataggatatgtaaaaaatataagtcaagaaaatgccccagggcccgcacacaacggtcgagagacaatataccccaatggaaccctgctgatccagaacgttacccacaatgacgcaggattctataccctacacgttataaaagaaaatcttgtgaatgaagaagtaaccagacaattctacgtattctcggagccacccaagccctccatcaccagcaacaacttcaatccggtggagaacaaagatattgtggttttaacctgtcaacctgagactcagaacacaacctacctgtggtgggtaaacaatcagagcctcctggtcagtcccaggctgctgctctccactgacaacaggaccctcgttctactcagcgccacaaagaatgacataggaccctatgaatgtgaaatacagaacccagtgggtgccagccgcagtgacccagtcaccctgaatgtccgctatgagtcagtacaagcaagttcacctgacctctcagctgggaccgctgtcagcatcatgattggagtactggctgggatggctctgatatagcagccttggtgtagtttctgcatttcgggaagagtgtttttattatccacctgcagactggactggattcttctagctccttcaatcccattttctcctgtggcatcactaagtataagacctgctctcttcctgaagacctataagctggaggtggacaactcaatgtaaatttcaaggaaaaaccctcatgcctgagatgtgggccactcagagctaaccaaaatgttcaacaccataactagagacactcaaattgccaaccaggacaagaagttgatgacttcatgctgtggacagtttttcccaagatgtcccaagcctcatcgtgacgaggctcttatcccactccatttttccctgctcatgcctgcctctttaatttggtaagataatgctgtaactagaatttcacaatcagcgccttgtgcaggcaatttgacagagtgttggatgtgtcatgtcatcatgtcaaacccaaatatttgacctaagggatcctttattctgcccagtggctaactttaacaacatccctaatacaactgtttattcaaatgcacggtggtccctgttagagttagacctctagactcacctgttctcacgccctgttttaatttaacccagctatgggatgccagataacagaattgctgcctacgagctgaacagggaggagtttgtgcagttgctgacacttcttgttgcacataaataaatacagtgggtactatagagactcagttgcaaaaattaacaaatatgctgcttgattaaaatgggtaggcttctcatgtggctcattctttaatctattctcttttatttggtttggttcatggggtctctgcctatggatcatacttcaaactcttggtgtgatcctcctgattgtcacaatattagttaccctggtgtgctgtattctctaaaacctttaaatgtttgcatgcagccattcgtcaaatgtcaaatattctctctttggctggaatgacaaaaactcaaataaatgtatgattaggaggacatcataacctatgaatgatggaagtccaaaatgatggtaactgacagtagtgttaatgccttatgtttagtcaaactctcatttaggtgacagcctggtgactccagaatggagccagtcatgctaaatgccatatactcacactgaaacatgaggaagcaggtagatcccagaacagacaaaactttcctaaaaacatgagagtccaggctgtctgagtcagcacagtaagaaagtcctttctgctttaactcttagaaaaaagtaatatgaagtattctgaaattaaccaatcagtttatttaaatcaatttatttatattcttctgttcctggattcccattttacaaaacccactgttctactgttgtattgcccagtaggagctatcactatattttgcagaatggaaactgccctgactcttgaatcacaaataaaagccaattgtatctgtt

SEQ ID NO: 2265 - protein, 265 aa, Homo sapien
MGSPSACPYRVCIPWQGLLLTASLLTFWNLPNSAQTNIDVVPFNVAEGKEVLLVVHNESQNLYGYNWYKGERVHANYRIIGYVKNISQENAPGPAHNGRETIYPNGTLLIQNVTHNDAGFYTLHVIKENLVNEEVTRQFYVFSEPPKPSITSNNFNPVENKDIVVLTCQPETQNTTYLWWVNNQSLLVSPRLLLSTDNRTLVLLSATKNDIGPYECEIQNPVGASRSDPVTLNVRYESVQASSPDLSAGTAVSIMIGVLAGMALI

SEQ ID NO: 2266 - DNA, 1658 bp, Homo sapien
ggcacgagctcggctcctggaaagatggaggcagcggagacagaggcggaagctgcagccctagaggtcctggctgaggtggcaggcatcttggaacctgtaggcctgcaggaggaggcagaactgccagccaagatcctggttgagtttgtggtggactctcagaagaaagacaagctgctctgcagccagcttcaggtagcggatttcctgcagaacatcctggctcaggaggacactgctaagggtctcgaccccttggcttctgaagacacgagccgacagaaggcaattgcagctaaggaacaatggaaagagctgaaggccacctacagggagcacgtagaggccatcaaaattggcctcaccaaggccctgactcagatggaggaagcccagaggaaacggacacaactccgggaagcctttgagcagctccaggccaagaaacaaatggccatggagaaacgcagagcagtccagaaccagtggcagctacaacaggagaagcatctgcagcatctggcggaggtttctgcagaggtgagggagcgtaagacagggactcagcaggagcttgacagggtgtttcagaaacttggaaacctgaagcagcaggcagaacaggagcgggacaagctgcagaggtatcagaccttcctccagcttctgtataccctgcagggtaagctgttgttccctgaggctgaggctgaggcagagaatcttccagatgataaaccccagcagccgactcgaccccaggagcagagtacaggagacaccatggggagagaccctggtgtgtccttcaaggctgttggtctacaacctgctggagatgtaaatttgccatgacttcctggaggacagcagcatggagaaagatcctagaaaaggcctctgacttccctcacctcccaaccatcattacaggaaagactgtgaactcctgagttcagcttgatttctgactacatcccagcaagctctggcatctgtggattaaaatccctggatctctctcagttgtgtatttgttcatcttcatatgctggcaggaacaactattaatacagatactcagaagccaataacatgacaggagctgggactggtttgaacacagggtgtgcagatggggagggggtactggccttgggcctcctatgatgcagacatggtgaatttaattcaaggaggaggagaatgttttaggcaggtggttatatgtgggaagataattttattcatggatccaaatgtttgttgagtcctttctttgtgctaaggttcttgcggtgaaccagaattataacagtgagctcatctgactgttttaggatgtacagcctagtgttaacattcttggtatctttttgtgccttatctaaaacatttctcgatcactggtttcagatgttcatttattatattcttttcaaagattcagagattggcttttgtcatccactattgtatgttttgtttcattgacctctagtgataccttgatctttcccactttctgttttcggattggagaagatgtaccttttttgtcaactcttacttttatcagatgatcaactcacgtatttggatctttatttgttttctcaaataaatatttaaggttaaaaaaaaaaaaaaaaaaa

SEQ ID NO: 2267 - protein, 277 aa, Homo sapien
MEAAETEAEAAALEVLAEVAGILEPVGLQEEAELPAKILVEFVVDSQKKDKLLCSQLQVADFLQNILAQEDTAKGLDPLASEDTSRQKAIAAKEQWKELKATYREHVEAIKIGLTKALTQMEEAQRKRTQLREAFEQLQAKKQMAMEKRRAVQNQWQLQQEKHLQHLAEVSAEVRERKTGTQQELDRVFQKLGNLKQQAEQERDKLQRYQTFLQLLYTLQGKLLFPEAEAEAENLPDDKPQQPTRPQEQSTGDTMGRDPGVSFKAVGLQPAGDVNLP

SEQ ID NO: 2268 - DNA, 2414 bp, Homo sapien
cgcccgggcaggtctttattttatttatgctatctatttcttttcctttttttttttttttttttgagatgaagtcttactctgttgcccaggctggagtgtagtggtgtgatctcggctcgctgcagccactgcctcctgggttcaggtgattctcctgacttagcctcctgagtggctgggactgcaggagcatgccatcatgcccagctgatttttgtatttttagtagagatggggtttcaccgtgttggccagaatggtttgcattcctgacctcaagtgatctgcctgcctcagcctcccaaaatgttgggtacaggggtgagccaccgtgccttgctattaatgccatctatttcactgaagattccgcctctcatttcttgagtcattttttttaaatttccttaaattggacttcacattttctgatgcctccttgtttagcttaataactgaccttctgaattcttttttaggaaaatcaggaatttcttcttggtttggagccattgctggacatcctttgccattcaacctctgatttgcacaaggtgactaaaggaccagcagcaaacaaaacgtttggtcttctagagtgcactaaagcagaagatacgtaacatttttatcttaccatgaaagtattatctgaaggacagttaaagctttgtgttgttcaaccagtacatctcacttcatggctccttatattttttattctaaagtctatctcttgtctaaaacctgctcgacttccaatttatcaaaggaaaccttttatagctgcttggaatgctccaacagatcagtgtttgataaaatataatttaagactaaatttgaaaatgtttcctgtgattggaagcccactggccaaggccagggggcaaaatgtcactatattttatgtcaacagattgggatactatccgtggtatacatcacagggggtccccattaatggaggtctcccacagaacataagtttacaagtacatctggaaaaagctgaccaagatattaattattacatccctgctgaagatttcagtggacttgctgttatagattgggaatattggagaccacagtgggcccggaactggaactcaaaagatgtttacagacagaagtcaagaaagcttatttccgatatgggaaagaatgtatcagctaccgatattgaatatttagccaaagtgacctttgaagaaagtgcaaaagctttcatgaaggaaaccatcaaattgggaattaagagccgacccaaaggcctttggggttattatttatatcctgattgccacaattataacgtttatgccccaaactactctgggtcatgcccagaagacgaagtcttgaggaacaatgagctctcttggctctggaacagcagtgctgctttatatccttctatctgtgtctggaaatcccttggagacagtgaaaacattttgcgcttctccaaatttcgggtgcatgaatccatgaggatctccaccatgacatctcatgattatgctctgcctgtatttgtctacacaaggctagggtacagagatgaacctttatttttcctttctaagcaagatctagtcagcaccataggagaaagtgctgccttgggagctgcaggcattgttatttggggagacatgaatttaactgcatccaaggccaactgtacaaaggtgaagcagtttgtgagttctgatttagggagctacatagccaatgtgaccagagctgctgaggtatgcagccttcacctctgcaggaacaatggcaggtgcataaggaagatgtggaacgcgcccagttaccttcacttgaaccctgcaagttaccacatagaggcctctgaggacggggagtttactgtgaaaggaaaagcatctgatacagacctggcagtgatggcagatacattttcctgtcattgttatcagggatatgaaggagctgattgcagagaaataaagacggctgatggctgctctggggtttccccttctcctggttcactaatgacactttgtctactgcttttagcaagttatcgaagcattcagttgtgagataattgagtttaaagggaattgtgtggcctctagcctagtcatttaaagaaggatgtaacttataacattttttttctcttatgaattctattgagagatattataagtagacattatgtatgtcacttaacataaacagaaacattattttatttgcctccagtctggctaggaaaccagatctggggtaaagtcaatgtacacttcctccttattggaatatttaagttgcatttaaactaaaactagtataatttagtcttttcatgaatgtacatacataaaattatacataaaaatattaaattattcatttcaaaaaaa

SEQ ID NO: 2269 - protein, 481 aa, Homo sapien
MKVLSEGQLKLCVVQPVHLTSWLLIFFILKSISCLKPARLPIYQRKPFIAAWNAPTDQCLIKYNLRLNLKMFPVIGSPLAKARGQNVTIFYVNRLGYYPWYTSQGVPINGGLPQNISLQVHLEKADQDINYYIPAEDFSGLAVIDWEYWRPQWARNWNSKDVYRQKSRKLISDMGKNVSATDIEYLAKVTFEESAKAFMKETIKLGIKSRPKGLWGYYLYPDCHNYNVYAPNYSGSCPEDEVLRNNELSWLWNSSAALYPSICVWKSLGDSENILRFSKFRVHESMRISTMTSHDYALPVFVYTRLGYRDEPLFFLSKQDLVSTIGESAALGAAGIVIWGDMNLTASKANCTKVKQFVSSDLGSYIANVTRAAEVCSLHLCRNNGRCIRKMWNAPSYLHLNPASYHIEASEDGEFTVKGKASDTDLAVMADTFSCHCYQGYEGADCREIKTADGCSGVSPSPGSLMTLCLLLLASYRSIQL

SEQ ID NO: 2270 - DNA, 939 bp, Homo sapien
actgagaggagacacaaggagcagcccgcaagcaccaagtgagaggcatgaagttacagtgtgtttccctttggctcctgggtacaatactgatattgtgctcagtagacaaccacggtctcaggagatgtctgatttccacagacatgcaccatatagaagagagtttccaagaaatcaaaagagccatccaagctaaggacaccttcccaaatgtcactatcctgtccacattggagactctgcagatcattaagcccttagatgtgtgctgcgtgaccaagaacctcctggcgttctacgtggacagggtgttcaaggatcatcaggagccaaaccccaaaatcttgagaaaaatcagcagcattgccaactctttcctctacatgcagaaaactctgcggcaatgtcaggaacagaggcagtgtcactgcaggcaggaagccaccaatgccaccagagtcatccatgacaactatgatcagctggaggtccacgctgctgccattaaatccctgggagagctcgacgtctttctagcctggattaataagaatcatgaagtaatgtcctcagcttgatgacaaggaacctgtatagtgatccagggatgaacaccccctgtgcggtttactgtgggagacagcccaccttgaaggggaaggagatggggaaggccccttgcagctgaaagtcccactggctggcctcaggctgtcttattccgcttgaaaatagccaaaaagtctactgtggtatttgtaataaactctatctgctgaaagggcctgcaggccatcctgggagtaaagggctgccttcccatctaatttattgtgaagtcatatagtccatgtctgtgatgtgagccaagtgatatcctgtagtacacattgtactgagtggtttttctgaataaattccatattttacctatga

SEQ ID NO: 2271 - protein, 177 aa, Homo sapien [sequence omitted]

SEQ ID NO: 2272 - DNA, 2722 bp, Homo sapien
ggcacgagggggaggcggcggcgagtcggtgagcagctgggaagagcagaaccggggcggagcacctgcaggcgcgggcggcggccccaccatggcgattcgcaagaaaagcaccaagagccccccagtgctgagccacgaattcgtcctgcagaatcacgcggacatcgtctcctgtgtggcgatggtcttcctgctggggctcatgtttgagataacggcaaaagcttctatcatttttgttactcttcagtacaatgtcaccctcccagcaacagaagaacaagctactgaatcagtgtccctttattactatggcatcaaagatttggctactgttttcttctacatgctagtggcgataattattcatgccgtaattcaagagtatatgttggataaaattaacaggcgaatgcacttctccaaaacaaaacacagcaagtttaatgaatctggtcagcttagtgcgttctacctttttgcctgtgtttggggcacattcattctcatctctgaaaactacatctcagacccaactatcttatggagggcttatccccataacctgatgacatttcaaatgaagtttttctacatatcacagctggcttactggcttcatgcttttcctgaactctacttccagaaaaccaaaaaagaagatattcctcgtcagcttgtctacattggtctttacctcttccacattgctggagcttaccttttgaacttgaatcatctaggacttgttcttctggtgctacattattttgttgaatttcttttccacatttcccgcctgttttattttagcaatgaaaagtatcagaaaggattttctctgtgggcagttctttttgttttgggaagacttctgactttaattctttcagtactgactgttggttttggccttgcaagagcagaaaatcagaagctggatttcagtactggaaacttcaatgtgttagctgttagaatcgctgttctggcatccatttgcgttactcaggcatttatgatgtggaagttcattaattttcagcttcgaaggtggagggaacattctgcttttcaggcaccagctgtgaagaagaaaccaacagtaactaaaggcagatcttctaaaaaaggaacagaaaatggtgtgaatggaacattaacttcaaatgtagcagactctccccggaataaaaaagagaaatcttcataatgaattataaactaattgattaatgtccccaaagaaatctgctttctactatatctttcagcattagagatttttctgttcttgaaaatacagtctgtgctctttgatttttgctattgtacggtttcatgcatttttttaaagggcatttgaggggaggattattgctatgaatgaaaaaaatattttagcttagactaagctacctgccttcaaaatagtttagggaccaccaccatattttattttgtttttatttttgaacatttttctaatgatttggagagaaaactatttacaaaaattccacatatcagtgatacaatttcttgctgtcaccaattttttataatagcagagtggcctgttctaagaaggccatattttttaagttatctttcagggtaacatggaaatactataaagttggatgtcaaactttaatatgttttcagtgttctctaattttttggaatttttgtagactttacacctggaaaaaaagatttgtaaaatcaccggaacaattgtgtgctttattttataggtagtggttattagtattacatccccattttaaaaacaaaaacataataatggttacaacacgtggagttttactaacatacatattaaatcaaagtatattcttaaaagtacttgtgaagtaaaatctttcttgtgcattttcaatacttgtaaactggaaatcagaaaatatttactatgaacaggaaaatctgacatatagccctttttgatatgtttattaataatgattcttaatggggctcataataagtttaatatgcacagcatcttagaaaagtttaacctgcaaacacttttaaaacataatgcctacttgatttatatctataaaaagactgacaggtaattatatttggaaaacatttaatgcactaactttaaagaaattgaaaattcaggtggataaatagtcttacaaaagacaatgtgctttatgttatacctatagctttggtcccatctttaattgagaaacatttatctgtataaaacatatttttggataaatatatatatatatatttgtatcgctacagaaaggctctaaaaagcatttgaggaaaatatttggttcccttttctataatcatcctttaagattcttatagctacatttggtttattcatcatatttacagtatatatattgttcttttcagtgttcacatcttgttccccatttctcacttgtgtcaccagctgtttgtgccatttttagtgtaaaagttgcagacctattagatctgcagtttaagttgccatgctgctaggaaattgtcctttttctttctagctgttaacctacttcctggaaaaagtagtagctctctgtagcattatggagtttcagtggaaccaaatttttgccattaaaaactggcattatactgaactatacattgagaaatcaatcaaaataaaaatttttactttcacaaaaaaaaaaaaaaaaaa

SEQ ID NO: 2273 - protein, 374 aa, Homo sapien
MAIRKKSTKSPPVLSHEFVLQNHADIVSCVAMVFLLGLMFEITAKASIIFVTLQYNVTLPATEEQATESVSLYYYGIKDLATVFFYMLVAIIIHAVIQEYMLDKINRRMHFSKTKHSKFNESGQLSAFYLFACVWGTFILISENYISDPTILWRAYPHNLMTFQMKFFYISQLAYWLHAFPELYFQKTKKEDIPRQLVYIGLYLFHIAGAYLLNLNHLGLVLLVLHYFVEFLFHISRLFYFSNEKYQKGFSLWAVLFVLGRLLTLILSVLTVGFGLARAENQKLDFSTGNFNVLAVRIAVLASICVTQAFMMWKFINFQLRRWREHSAFQAPAVKKKPTVTKGRSSKKGTENGVNGTLTSNVADSPRNKKEKSS

SEQ ID NO: 2274 - DNA, 579 bp, Homo sapien
atgtcaggctgtgataggagggaaacagaaaccaaaggaaagaacagctttaagaagcgcttaagaggtccaaaggtgaagaacttaaacccgaagaaattcagcattcatgaccaggatcacaaagtactggtcctggactctgggaatctcatagcagttccagataaaaactacatacgcccagagatcttctttgcattagcctcatccttgagctcagcctctgcggagaaaggaagtccgattctcctgggggtctctaaaggggagttttgtctctactgtgacaaggataaaggacaaagtcatccatcccttcagctgaagaaggagaaactgatgaagctggctgcccaaaaggaatcagcacgccggcccttcatcttttatagggctcaggtgggctcctggaacatgctggagtcggcggctcaccccggatggttcatctgcacctcctgcaattgtaatgagcctgttggggtgacagataaatttgagaacaggaaacacattgaattttcatttcaaccagtttgcaaagctgaaatgagccccagtgaggtcagcgattag

SEQ ID NO: 2275 - protein, 192 aa, Homo sapien
MSGCDRRETETKGKNSFKKRLRGPKVKNLNPKKFSIHDQDHKVLVLDSGNLIAVPDKNYIRPEIFFALASSLSSASAEKGSPILLGVSKGEFCLYCDKDKGQSHPSLQLKKEKLMKLAAQKESARRPFIFYRAQVGSWNMLESAAHPGWFICTSCNCNEPVGVTDKFENRKHIEFSFQPVCKAEMSPSEVSD

SEQ ID NO: 2276 - DNA, 1358 bp, Homo sapien
gaaagaagataccaacagcctcctgaaactcacgagagtggacactccagtgttgaccacctaagataccactcctgctccaaagattacagctcccttgtcattctgactcctgggcttaccctacaccccagagatggagcaactactaggaataaaacttggctgcctgtttgccctgttggctctcactctgggctgtggccttactcccatctgcttcaaatggttccagattgatgcagccagaggtcatcaccggcgagtcctcagactcctgggctgtatttctgctggtgttttcctgggagcagggttcatgcatatgactgctgaagccctggaggaaattgaatcacagattcagaagttcatggtgcagaacagatcagcaagtgagagaaattcttctggtgatgctgattcagctcatatggagtatccctatggagagctcatcatctccctgggcttctttcttgtcttctttttggagtcgctggcattgcagtgctgtcctggggctgctggaggatcgacagtgcaggacgaagaatggggtggggctcatatcttcgaactccacagccatggacatttaccctcaccctcaaagggtcccctccgagcccttgtcctcttgctgtcactctcctttcactcagtgtttgaagggctagctgtggggctgcagccgacagtagcagctaccgtgcagctctgccttgctgtcctggctcataaggggcttgtggtgtttggtgtaggaatgcggctagtgcatttaggtaccagctcacgatgggcagtgttctccatactattattagctctcatgtcccccctgggcctagccgtagggctggctgtgactggaggggactctgaaggagggcggggcttagcccaggctgtgttagagggtgtggcagctggtaccttcctgtatgtcaccttcctagaaattcttccacgggagctagctagtcctgaggcccctctagctaagtggagctgtgtagccgctggttttgccttcatggcctttattgccttgtgggcctgagagattcctggcttttctgatggacctatttaggacaacctctctatccccagggagacctcccaaatggctttgaccctcagacatttctttactcagactaaatagcattcagtaggactggactggaccccaggtttcctttacatgagatcccatttctcaccctggactaagacaaagatatttaggttgagcagctattaattggagaattggtacagagacgctccagattttattcttatcccatttatgctactgtgtgtaataaaatgcccattttaccctc

SEQ ID NO: 2277 - protein, 309 aa, Homo sapien
MEQLLGIKLGCLFALLALTLGCGLTPICFKWFQIDAARGHHRRVLRLLGCISAGVFLGAGFMHMTAEALEEIESQIQKFMVQNRSASERNSSGDADSAHMEYPYGELIISLGFFLVFFLESLALQCCPGAAGGSTVQDEEWGGAHIFELHSHGHLPSPSKGPLRALVLLLSLSFHSVFEGLAVGLQPTVAATVQLCLAVLAHKGLVVFGVGMRLVHLGTSSRWAVFSILLLALMSPLGLAVGLAVTGGDSEGGRGLAQAVLEGVAAGTFLYVTFLEILPRELASPEAPLAKWSCVAAGFAFMAFIALWA

SEQ ID NO: 2278 - DNA, 6834 bp, Homo sapien
  Unsure 4613-4614: Unknown base
ctcacacatagacacgcacacacaccctttctcgcacacacacacacacacacacacactctcacacattctcacatgctagacccttctaagcagcttgtccgtttttacacatgtatctgaactctcctgcatcactcttggccattttctcgcattcgattgcttttgccgttttttatttagatcagtacttgatttcattttcattttccagtctactttggggttctcgcagtggataatttagccaaaatgtttttcttgtggagacattagctgacaattcccaccacagactggcttgtacgtcctcccagggagacctaaacctggctcccctcccaccgcagttcttaatattgtggataagagatccatctttctcattctggatacctacttagtgctcatggaagaaggggtgccctgcccagccccagctgctaagctcacacctcctgtcaaaaagtcccaggacatgcacgacgagaggagcaagctggtgaatgagtatgcgtgtcgagtgctggaacttctggggatggggcatcgtctgtttgtgcctcggcttctggcgacctcaaaggaagaccttctgcaggctgattttgaaggtgctttaaagttctttagagttcagcttccaaagagatacagggcagaggaaaatgcaagaagactgatggagcaggcttgcaatattaaagtaccaaccaagaagctgaagaaatatgagaaagaatatcagacaatgcgagagagtcagctgcaacaggaagacccaatggatagatacaagagggagaaccgaagattacaggaggccagcatgaggttggaacaagagaatgatgaccttgcccatgaactagtaacaagcaaaattgctctacggaatgacttggatcaggcagaagacaaggcagatgtgttgaataaagagctccttttgaccaaacagaggctggtggagactgaagaggagaagaggaagcaagaggaagagactgcccagctaaaagaagtcttcaggaaacagctagagaaggcagaatatgaaataaagaagactacagctatcattgctgagtataaacagatctgttcgcagttgagtaccaggctggagaaacagcaagcagccagcaaggaggagctggaagtggtaaagggtaagatgatggcatgcaaacactgcagtgacattttcagcaaggagggtgctttgaaactagcagccacaggcagagaggaccagggaattgaaacagatgatgagaaggactcacttaagaagcagctgagagagatggaactggaactggcacaaaccaaactgcagttggtggaggccaagtgtaaaattcaggaacttgaacatcagagaggagcccttatgaatgaaatccaagctgcgaaaaactcttggtttagcaaaaccctgaactctatcaaaacggccacgggcacccagccattgcagccagcaccggtcacccagccacccaaggagagcacatagttccagccttacccaagcacaagagcacaatgttcaaaccaatggaaatctgggaggattcttcctggtgtccctttgaaggaaagtcaaggaggccagaaaacaagccagaatttttcagtagctctcactctttcttgtatgacacttttcaaagggatgctatttaaactgacctgttctatgttgaatacctattttccagcttctggaaggccatgttcagatccatcatagtattacacattattttgtttgcctgatgtttagttggaaataagtaattcagaactaaatgcttttttatttagaattattcataattatttttatcttacataaaaatggagacatctgttattccaaggttgaagtgataagaagatctttgtcacaggaaaaaaaaaaattgaaacctaaacatcttaagttttcaggatttattcagataaagcacactgtggggccaggcatgaccactctcaggtttcctcctgagcctgattcccagggaagtgttaatcctgtccaaaggaaagaaccaatcagcgatcattggtttactttcattttctgttcggtacatctggaaatgaagtgccaggaatagacgggctgttcagattatacgctaggtaaaaggaactgaaattttaataagtgtaggtcaggatcatttgggctgtggtattctaacagatccttttaagaatgccacataggacttgtgagttcctaagtacaccaaagtatggacacagatgtgacttctggcaattataaagttaaaggtggatattgcaccttacagacttagggagcctttaccagagacgcctaaaaagccccaggttcagccattgtgctgaatagagtggaatatagaaccagggacagagtatttcatttaacgttgatatatacttgctaaggaaacactaacaatactgtaactttgttaaaggacatagtattgaaatgggaaatagaggtcaggctcacatcatcttagtttaatgctgggcaacttttttctgatttctgtagttccctgaaaatgtgtccttcgtacccataaagagatacaaatgcatttgtaacatttttgattgaatataaaacctttacagaaatacttatctcatggaaaggtaaagctattgtttaaaaattagtggaaatattttttcaattatatttaacatgcctataaaaatagtccttgcaggaaattatttgataagagcaaaactatttttattttataaactattttggaggcctctgatcctttcaaaccaaccaaactactattagatatgtacaataacatttgttgatattaatcattggcctcattgttgaacatattatttgcaaagaatcttaaactctgtagtgccagaatgattctcatctgtgccatattttgcaattaaaagtaacacacccttagaagaatcaaataagagccatctacatcccaggaggatgcaccaagttgctcacagtggatcttttcctctaaaatgatcttttatgttctaaaaagtgaaatcccctttatctgtgtttatattctctacagcccataaaactgatgtgattgttatgttatactcatcagataatacttttcttacataaatctttcattgttgttctgacatctttcattacaaaatttattttcttaacaaaaaggaacataacccagcattccaagtgtctgtgttggctttaacattctctacatggtggtctagataagctaattttttttttttttttttttgtaaaatgtaatagctagaaaatgttatcttcgcgcttgtttttgtaaatcatttagtataggctgttagctttactggtactttacgctttgattccaagaagccttgtgcagttgccttatcaaatggccagctaaattaaagatgctcttttgtgttgtgaatttcatagttctgtacagagcttgtttcaatttacaaaaataagtacattccacagaatgcctaaattgtgtaattttctttaaataatagtaggtgagggagaaacataatggctctaggtcaatcccttatctaaagaccttgttcaacttcatagtccctttccttttaaagaggagaagagaaaaatcccccctggccaggcatggtggctcacatctgtaatcccagcactttgggaggctgaggtgggtggatcacctaaggtcaggagtttgagaccagcctggccaacatggtgaaaccctatctctactgcaaaatacaaaaattagccgggcttggtggcgggtgcctgtaatcccagctactcgggaggttgaggcaggagaatcacttgaacccaggaggcagaggttgcagtgggccaagattacggcattacattccatccagcctgggcgacaagagcaaaattccgtctcgaaaaatcaccaggtacatacctctcaagtttgataagtccatcttttgagttttcttttagctctttcaaaagattacgagggcaatacatattttttttttttttattctccagccccatatcatacttgggtatgcctgttggtaccataagcctaaactctccttcactgcaatgcctttgagtcagtagcaatagtaaagactagaaacaaagaaaattcagaatttggtatgtgatatgattgttcatacaatatgttataatagcaatattccaaacaatatgtccttcactgtctattgttggaaaactcatgcatcccagcatgaagtaactcctagttttaattttagttattttgagatatatttgagaattgcatctcttctcttgaatttcacttagaagagattaaccagccaaatatccaggaaagtttcaaaacattctagtgtttttcatcctttgctaggatgcactctgtacaaaacattcctctgaaaatctaatatttgcagtatctaagaattgatcatttctattttcattaaattctgtggaaaaaattaaatgaatgaaattcaacttcataattcagttcatcagcttttgtatcttgagaatctaaacacgtctnnaaatctgaaagaaaccaagctggattttgcagtgcatatgtttgctagcttcccacatcctgaaccatgtcaaaatttggttttatttagttacatataatttaatgcaaagaaattctgttacttaatgttctgtttatttatgagtgcctatcaggaacactaataggaatgccattcaaccagtgtcttctgcccctctcccagctgttaaattagtacttcttcattggctttctgaaatgtcctgagtaaagtagaaaagcaacctttgtatggatgtggggatatttaatagtatgtatcttgtttcatttttttcctatgatgtattaatatttatttttctccaacccctgctccattttcttaaaatattttccagttaataactagttgctttatttcctagctgaagtgagaaaaccaacggaaaacaatacagatttgggcagaggagatagagttacatctttaaaggagtgagccagtcacccaggagaatcacatgtgtaactgatgtaggggtttaagtcttcatactttcactaaaatctgtctactaactctcccaccaacctttgcatcaaacacttaggtacctgcctgattaggggggcccctttaagggaaaaaacttttaaaaaattaaatgccttggttttgttttatcttctgggaaagaacacttttacttgattagcaagatgattatattatataacttgcccttaaaaacactccaaaatactgactccttttctccaattacaaatgagtgtgaagaaattctgttgtatgatttgaacactattaggtttgtatgtgtgtttaattggaagaattttatatagagtatctctgctgcttttgtttacctgggtaccacacaaccaaatacacattgagatttcaagaaatgatgatgaaagccagaaggccagaccacagctctgcagcctgtttcctacaaccagatataaaactctttctcgtcgccatgctgatagtcacactgaactagaactgtcccaacacattcttcctctctcataatggcttccatttaatacaggcaaagccctttaccttagcaaattctttatctttcaaaagtgaccaaaatgaggacttcaaccttggctgcacctcaataggagatgctgatcttgagttgtaatgagaaaagtgggcatataggagattttagtgactgcagtcagctgtctggcattcctttctcagtttgcatctaaaagactacatatgtcaagcttatctccacctgaatttgctgcctgctataaaaacatttcattaatatatcccattcttcctacctccatctctggtttgtcattagtggtattctgaaaagcttaagaaaaaagaatcattgagtagaaagtgaacattttaagttattttcctttttcattggcaattagttaacatgtaaaatcttttccattaaactgtataacttttaataactatatattatatatgggataaaatatatggactgaattgtgagaatataaatgcatcgaaagactctggtgtcatgaaagcacaagaataaggctggagatggtcccagatccaagatgtcccaaaagccttttgtatcagtttctctatttttggtattttgcataatgcatggatccttagttcaaatgagggacaaagtttctcagtcagccccacttcctttctttctaactcctacctttcccttgcagaggaggtagtagagattctggaattgtctatttttatgaattccattattttgtccatggcatctctaatgaaaacaggttctagaataaaggagttgattagtctgaacagtactaattaactacaaaataaacgttagtgatcagcctcttcctctataaacaatgaccaattagacgtttccgtaattccatgtattatgtatagtacactctataaatgtaaatgtaatgcttgtctaaaaagtgcaatttattgtacattgtcccaacaaatgtttacttttataatcgttatgaacttgaattggattagtatcttgtttttatgtgtgaatgaagccttgtgaaataaacaaatgcaactgagaaggtaacaaggtgactgtttttgtgagccagtgatgttttcaatgctttgtgttgcccctttggccccattaagcagtaataaacatttgttctgaagtcc

SEQ ID NO: 2279 - protein, 370 aa, Homo sapien
  Unsure 4613-4614: Unknown amino acid
MEEGVPCPAPAAKLTPPVKKSQDMHDERSKLVNEYACRVLELLGMGHRLFVPRLLATSKEDLLQADFEGALKFFRVQLPKRYRAEENARRLMEQACNIKVPTKKLKKYEKEYQTMRESQLQQEDPMDRYKRENRRLQEASMRLEQENDDLAHELVTSKIALRNDLDQAEDKADVLNKELLLTKQRLVETEEEKRKQEEETAQLKEVFRKQLEKAEYEIKKTTAIIAEYKQICSQLSTRLEKQQAASKEELEVVKGKMMACKHCSDIFSKEGALKLAATGREDQGIETDDEKDSLKKQLREMELELAQTKLQLVEAKCKIQELEHQRGALMNEIQAAKNSWFSKTLNSIKTATGTQPLQPAPVTQPPKEST

SEQ ID NO: 2280 - DNA, 837 bp, Homo sapien
gaattccgcggcggcgcctcaatgcctaaaggaggaagaaagggaggccacaaaggccgggcgaggcagtatacaagccctgaggagatcgacgcgcagctgcaggctgagaagcagaaggccagggaagaagaggagcaaaaagaaggtggagatggggctgcaggtgaccccaaaaaggagaagaaatctctagactcagatgagagtgaggatgaagaagatgactaccagcaaaagcgcaaaggcgttgaagggctcatcgacatcgagaaccccaaccgggtggcacagacaaccaaaaaggtcacacaactggatctggacgggccaaaggagctttcgaggagagaacgagaagagattgagaagcagaaggcaaaagagcgttacatgaaaatgcacttggccgggaagacagagcaagccaaggctgacctggcccggctggccatcatccggaaacagcgggaggaggctgcccggaagaaggaagaggaaaggaaagcaaaagacgatgccacattgtcaggaaaacgaatgcagtcactctccctgaataagtaactgcgacccgtgggaggagatgccggggacctgggccgcgctgccaggacctctgctgtgtctcgcccaccctgtgccctggcgccgctgcaacagcccctcatggccaggagccccccatgcctgggcctcctcttcatcttggcacagaaattgtttgggggatgggggggggactgggggaggggtagctgctatctttgagacagaaagatgcaggacagcatttcatatgtaaccatttgaatgtttttgctgtttttagaattc

SEQ ID NO: 2281 - protein, 181 aa, Homo sapien
MPKGGRKGGHKGRARQYTSPEEIDAQLQAEKQKAREEEEQKEGGDGAAGDPKKEKKSLDSDESEDEEDDYQQKRKGVEGLIDIENPNRVAQTTKKVTQLDLDGPKELSRREREEIEKQKAKERYMKMHLAGKTEQAKADLARLAIIRKQREEAARKKEEERKAKDDATLSGKRMQSLSLNK

SEQ ID NO: 2282 - DNA, 2725 bp, Homo sapien
agtaagcactctcccttgtcgtggaggtgggcaaatctttatcagccactgccttctgctgccaggaagccagctagagtggtctttaaagaaaactgggcatctcctgctacttaaaatcaaaaactacctaaaataaagattatagagccagaggaagagatagccatggaggacagccccactatggttagagtggacagccccactatggttaggggtgaaaaccaggtttcgccatgtcaagggagaaggtgcttccccaaagctcttggctatgtcaccggtgacatgaaagaacttgccaaccagcttaaagacaaacccgtggtgctccagttcattgactggattctccggggcatatcccaagtggtgttcgtcaacaaccccgtcagtggaatcctgattctggtaggacttcttgttcagaacccctggtgggctctcactggctggctgggaacagtggtctccactctgatggccctcttgctcagccaggacaggtcattaatagcatctgggctctatggctacaatgccaccctggtgggagtactcatggctgtcttttcggacaagggagactatttctggtggctgttactccctgtatgtgctatgtccatgacttgcccaattttctcaagtgcattgaattccatgctcagcaaatgggacctccccgtcttcaccctccctttcaacatggcgttgtcaatgtacctttcagccacaggacattacaatccgttctttccagccaaactggtcatacctataactacagctccaaatatctcctggtctgacctcagtgccctggagttgttgaaatctataccagtgggagttggtcagatctatggctgtgataatccatggacagggggcattttcctgggagccatcctactctcctccccactcatgtgcctgcatgctgccataggatcattgctgggcatagcagcgggactcagtctttcagccccatttgagaacatctactttggactctggggtttcaacagctctctggcctgcattgcaatgggaggaatgttcatggcgctcacctggcaaacccacctcctggctcttggctgtgccctgttcacggcctatcttggagtcggcatggcaaactttatggctgaggttggattgccagcttgtacctggcccttctgtttggccacgctattgttcctcatcatgaccacaaaaaattccaacatctacaagatgcccctcagtaaagttacttatcctgaagaaaaccgcatcttctacctgcaagccaagaaaagaatggtggaaagccctttgtgagaacaagccccatttgcagccatggtcacgagtcatttctgcctgactgctccagctaacttccagggtctcagcaaactgctgtttttcacgagtatcaactttcatactgacgcgtctgtaatctgttcttatgctcattttgtattttcctttcaactccaggaatatccttgagcatatgagagtcacatccaggtgatgtgctctggtatggaatttgaaaccccaatggggccttggcactaagactggaatgtatataaagtcaaagtgctccaacagaaggaggaagtgaaaacaaactattagtatttattgatattcttggtgtttagctggctcgatgatgttaacagtattaaaaattaaacccccataaacccaacctaagcctatggaatccacagtcacaaaatcgaagttaacccagaatctgtgataagcagcttggctttttttttaaatcaatgcaagtacaccattatagccagaatctgtatcacagaggtgcaagctgacagcagagctcagtccccacttcctgcaaacaatggcctgcaccctatcccttgtgtgtgtgacattctctcatgggacaatgttggggtttttcagactgacaggactgcaagagggagaaaggaattttgtcaatcaaaattattctgtattgcaacttttctcagagattgcaaaggattttttaggtagagattatttttccttatgaaaaatgatctgttttaaatgagataaaataggagaagttcctggcttaacctgttcttacatattaaagaaaagttacttactgtatttatgaaatactcagcttaggcatttttactttaacccctaaattgattttgtaaatgccacaaatgcatagaattgttaccaacctccaaagggctctttaaaatcatatttttttattcatttgaggatgtcttataaagactgaaggcaaaggtcagaatgcttacgggtgttatttttataagttgttgaattccttaatttagaaaagctcattattttttgcacactcacaatattctctctcagaaatcaatggcatttgaaccaccaaaaagaaataaagggctgagtgtggtgctcacgcctgtaatcccagcactttggggagcccaggcgggcagattgcttgaacccaggagttcaagaccagcctgggcagcatggtgaaaccctgtatctacaaaaaatacaaaaattagccaggcatggtggtgggtgcctgtagttccagctacttgggaggctgaggtgggaaaatgacttgagcccaggaggaggaggctgcagtgagctaagattgcaccactgcactccaacctgggtgacaagagtgaaactgaat

SEQ ID NO: 2283 - protein, 389 aa, Homo sapien
MEDSPTMVRVDSPTMVRGENQVSPCQGRRCFPKALGYVTGDMKELANQLKDKPVVLQFIDWILRGISQVVFVNNPVSGILILVGLLVQNPWWALTGWLGTVVSTLMALLLSQDRSLIASGLYGYNATLVGVLMAVFSDKGDYFWWLLLPVCAMSMTCPIFSSALNSMLSKWDLPVFTLPFNMALSMYLSATGHYNPFFPAKLVIPITTAPNISWSDLSALELLKSIPVGVGQIYGCDNPWTGGIFLGAILLSSPLMCLHAAIGSLLGIAAGLSLSAPFENIYFGLWGFNSSLACIAMGGMFMALTWQTHLLALGCALFTAYLGVGMANFMAEVGLPACTWPFCLATLLFLIMTTKNSNIYKMPLSKVTYPEENRIFYLQAKKRMVESPL

SEQ ID NO: 2284 - DNA, 1860 bp, Homo sapien
gcggatcctcacacgactgtgatccgattctttccagcggcttctgcaaccaagcgggtcttacccccggtcctccgcgtctccagtcctcgcacctggaaccccaacgtccccgagagtccccgaatccccgctcccaggctacctaagaggatgagcggtgctccgacggccggggcagccctgatgctctgcgccgccaccgccgtgctactgagcgctcagggcggacccgtgcagtccaagtcgccgcgctttgcgtcctgggacgagatgaatgtcctggcgcacggactcctgcagctcggccaggggtgcgcgaacaccggagcgcacccgcagtcagctgagcgcgctggagcgcgcctgagcgcgtgcgggtccgcctgtcagggaaccgaggggtccaccgacctcccgttagcccctgagagccgggtggaccctgaggtccttcacagcctgcagacacaactcaaggctcagaacagcaggatccagcaactcttccacaaggtggcccagcagcagcggcacctggagaagcagcacctgcgaattcagcatctgcaaagccagtttggcctcctggaccacaagcacctagaccatgaggtggccaagcctgcccgaagaaagaggctgcccgagatggcccagccagttgacccggctcacaatgtcagccgcctgcaccggctgcccagggattgccaggagctgttccaggttggggagaggcagagtggactatttgaaatccagcctcaggggtctccgccatttttggtgaactgcaagatgacctcagatggaggctggacagtaattcagaggcgccacgatggctcagtggacttcaaccggccctgggaagcctacaaggcggggtttggggatccccacggcgagttctggctgggtctggagaaggtgcatagcatcacgggggaccgcaacagccgcctggccgtgcagctgcgggactgggatggcaacgccgagttgctgcagttctccgtgcacctgggtggcgaggacacggcctatagcctgcagctcactgcacccgtggccggccagctgggcgccaccaccgtcccacccagcggcctctccgtacccttctccacttgggaccaggatcacgacctccgcagggacaagaactgcgccaagagcctctctggaggctggtggtttggcacctgcagccattccaacctcaacggccagtacttccgctccatcccacagcagcggcagaagcttaagaagggaatcttctggaagacctggcggggccgctactacccgctgcaggccaccaccatgttgatccagcccatggcagcagaggcagcctcctagcgtcctggctgggcctggtcccaggcccacgaaagacggtgactcttggctctgcccgaggatgtggccaagaccacgactggagaagccccctttctgagtgcaggggggctgcatgcgttgcctcctgagatcgaggctgcaggatatgctcagactctagaggcgtggaccaaggggcatggagcttcactccttgctggccagggagttggggactcagagggaccacttggggccagccagactggcctcaatggcggactcagtcacattgactgacggggaccagggcttgtgtgggtcgagagcgccctcatggtgctggtgctgttgtgtgtaggtcccctggggacacaagcaggcgccaatggtatctgggcggagctcacagagttcttggaataaaagcaacctcagaacaaaaaaaaaaaaaaaaaagcggagctcacagagttcttggaataaaagcaacctcagaacaaaaaa

SEQ ID NO: 2285 - protein, 405 aa, Homo sapien [sequence omitted]

SEQ ID NO: 2286 - DNA, 3007 bp, Homo sapien
gcccggagagccgcatctattggcagctttgttattgatcagaaactgctcgccgccgacttggcttccagtctggctgcgggcaacccttgagttttcgcctctgtcctgtcccccgaactgacaggtgctcccagcaacttgctggggacttctcgccgctcccccgcgtccccaccccctcattcctccctcgccttcacccccacccccaccacttcgccacagctcaggatttgtttaaaccttgggaaactggttcaggtccaggttttgctttgatccttttcaaaaactggagacacagaagagggctctaggaaaaagttttggatgggattatgtggaaactaccctgcgattctctgctgccagagcaggctcggcgcttccaccccagtgcagccttcccctggcggtggtgaaagagactcgggagtcgctgcttccaaagtgcccgccgtgagtgagctctcaccccagtcagccaaatgagcctcttcgggcttctcctgctgacatctgccctggccggccagagacaggggactcaggcggaatccaacctgagtagtaaattccagttttccagcaacaaggaacagaacggagtacaagatcctcagcatgagagaattattactgtgtctactaatggaagtattcacagcccaaggtttcctcatacttatccaagaaatacggtcttggtatggagattagtagcagtagaggaaaatgtatggatacaacttacgtttgatgaaagatttgggcttgaagacccagaagatgacatatgcaagtatgattttgtagaagttgaggaacccagtgatggaactatattagggcgctggtgtggttctggtactgtaccaggaaaacagatttctaaaggaaatcaaattaggataagatttgtatctgatgaatattttccttctgaaccagggttctgcatccactacaacattgtcatgccacaattcacagaagctgtgagtccttcagtgctacccccttcagctttgccactggacctgcttaataatgctataactgcctttagtaccttggaagaccttattcgatatcttgaaccagagagatggcagttggacttagaagatctatataggccaacttggcaacttcttggcaaggcttttgtttttggaagaaaatccagagtggtggatctgaaccttctaacagaggaggtaagattatacagctgcacacctcgtaacttctcagtgtccataagggaagaactaaagagaaccgataccattttctggccaggttgtctcctggttaaacgctgtggtgggaactgtgcctgttgtctccacaattgcaatgaatgtcaatgtgtcccaagcaaagttactaaaaaataccacgaggtccttcagttgagaccaaagaccggtgtcaggggattgcacaaatcactcaccgacgtggccctggagcaccatgaggagtgtgactgtgtgtgcagagggagcacaggaggatagccgcatcaccaccagcagctcttgcccagagctgtgcagtgcagtggctgattctattagagaacgtatgcgttatctccatccttaatctcagttgtttgcttcaaggacctttcatcttcaggatttacagtgcattctgaaagaggagacatcaaacagaattaggagttgtgcaacagctcttttgagaggaggcctaaaggacaggagaaaaggtcttcaatcgtggaaagaaaattaaatgttgtattaaatagatcaccagctagtttcagagttaccatgtacgtattccactagctgggttctgtatttcagttctttcgatacggcttagggtaatgtcagtacaggaaaaaaactgtgcaagtgagcacctgattccgttgccttgcttaactctaaagctccatgtcctgggcctaaaatcgtataaaatctggatttttttttttttttttgctcatattcacatatgtaaaccagaacattctatgtactacaaacctggtttttaaaaaggaactatgttgctatgaattaaacttgtgtcgtgctgataggacagactggatttttcatatttcttattaaaatttctgccatttagaagaagagaactacattcatggtttggaagagataaacctgaaaagaagagtggccttatcttcactttatcgataagtcagtttatttgtttcattgtgtacatttttatattctccttttgacattataactgttggcttttctaatcttgttaaatatatctatttttaccaaaggtatttaatattcttttttatgacaacttagatcaactatttttagcttggtaaatttttctaaacacaattgttatagccagaggaacaaagatgatataaaatattgttgctctgacaaaaatacatgtatttcattctcgtatggtgctagagttagattaatctgcattttaaaaaactgaattggaatagaattggtaagttgcaaagactttttgaaaataattaaattatcatatcttccattcctgttattggagatgaaaataaaaagcaacttatgaaagtagacattcagatccagccattactaacctattccttttttggggaaatctgagcctagctcagaaaaacataaagcaccttgaaaaagacttggcagcttcctgataaagcgtgctgtgctgtgcagtaggaacacatcctatttattgtgatgttgtggttttattatcttaaactctgttccatacacttgtataaatacatggatatttttatgtacagaagtatgtctcttaaccagttcacttattgtactctggcaatttaaaagaaaatcagtaaaatattttgcttgtaaaatgcttaatatcgtgcctaggttatgtggtgactatttgaatcaaaaatgtattgaatcatcaaataaaagaatgtggctattttggggagaaaatt

SEQ ID NO: 2287 - protein, 345 aa, Homo sapien
MSLFGLLLLTSALAGQRQGTQAESNLSSKFQFSSNKEQNGVQDPQHERIITVSTNGSIHSPRFPHTYPRNTVLVWRLVAVEENVWIQLTFDERFGLEDPEDDICKYDFVEVEEPSDGTILGRWCGSGTVPGKQISKGNQIRIRFVSDEYFPSEPGFCIHYNIVMPQFTEAVSPSVLPPSALPLDLLNNAITAFSTLEDLIRYLEPERWQLDLEDLYRPTWQLLGKAFVFGRKSRVVDLNLLTEEVRLYSCTPRNFSVSIREELKRTDTIFWPGCLLVKRCGGNCACCLHNCNECQCVPSKVTKKYHEVLQLRPKTGVRGLHKSLTDVALEHHEECDCVCRGSTGG

SEQ ID NO: 2288 - DNA, 2216 bp, Homo sapien
actacagcaacggcgacgaaagcagcgatcccgggccccaacaccgtgcccagggccccgggcccgagcccaccttaggtcccctcacccggctggagggcatcaaggtggggcacgagcgtaaggtccagctggtcaccgacagggatcacttcatccgaaccctcagcctcaagccgctgctcttcgaaatccccggcttcctgactgatgaagagtgtcggctcatcatccatctggcgcagatgaaggggttacagcgcagccagatcctgcctactgaagagtatgaagaggcaatgagcactatgcaggtcagccagctggacctcttccggctgctggaccagaaccgtgatgggcaccttcagctccgtgaggttctggcccagactcgcctgggaaatggatggtggatgactccagagagcattcaggagatgtacgccgcgatcaaggctgaccctgatggtgacggagtgctgagtctgcaggagttctccaacatggaccttcgggacttccacaagtacatgaggagccacaaggcagagtccagtgagctggtgcggaacagccaccatacctggctctaccagggtgagggtgcccaccacatcatgcgtgccatccgccagagggtgctgcgcctcactcgcctgtcgcctgagatcgtggagctcagcgagccgctgcaggttgttcgatatggtgaggggggccactaccatgcccacgtggacagtgggcctgtgtacccagagaccatctgctcccataccaagctggtagccaacgagtctgtacccttcgagacctcctgccggcaagtatctcccaactgggggctgccttcaatcctcagaccaggaacacccatgacacaggcacagccctgcactgtgggcgtgccccttggcatggggccaggagatcactgggttatcccggttagtgatgccctcacctctccccacaagttgtttacccaatggctggaaaggggtggctactggtcatcgtgaccactggagtcaacacagactgatgtacccacagacaccaaaacttgccccctgagttctgaagcaaggggcaaggctgggcccctagcttgtcctgcccattcctccaggtgttgatcttgattccacttagagaagctgaagctgtgcctccctcccctgtcaagccagttctttcctcttcaggtggctgttctggcccagccccttcccatccccaaggagcccttcagcgcgccctgttgcttctgctagcctacctttccctgccaggcccttgctcagggccatggcatttaactaagtgcacctgtgatcttggccaaaaaaccattgcaactcacagtaagagactgggtttcggggaaggaggggctagggacattttggcactggcctgccctattgtctcccatcctagtctgtcctggtccctggcaacaggaacctgggcagcttatcctgcccacaggtaagcccctgggagcatccacaactggggacctgctcagtgccccccctgccttacagctacatgacagtgctgttttatttgaacaacgtcactggtgggggcgagactgttttccctgtagcagataacagaacctacgatgaaatgagtctgattcaggatgacgtggacctccgtgacacacagaggcactgtgacaagggaaacctgcgtgtcaagccccaacagggcacagcagtcttctggtacaactacctgcctgatgggcaaggttgggtgggtgacgtagacgactactcgctgcacgggggctgcctggtcacgcgcggcaccaagtggattgccaacaactggattaatgtggaccccagccgagcgcggcaagcgctgttccaacaggagatggcccgccttgcccgagaagggggcaccgactcacagcccgagtgggctctggaccgggcctaccgcgatgcgcgcgtggaactctgagggaagagttagccccggttcccagccgcgggtcgccagttgcccaagatcaggggtccggctgtccttctgtcctgctgcagactaaaggtctggccaatgtcttgccccaccccgccagccgcgatacggcgcagttcctatattcatgttatttattgtgtactgactccatctgccccgtcaaataaaaaaccacaaggttcgaaaaaaaaaaaaaaaaa

SEQ ID NO: 2289 - protein, 259 aa, Homo sapien
MKGLQRSQILPTEEYEEAMSTMQVSQLDLFRLLDQNRDGHLQLREVLAQTRLGNGWWMTPESIQEMYAAIKADPDGDGVLSLQEFSNMDLRDFHKYMRSHKAESSELVRNSHHTWLYQGEGAHHIMRAIRQRVLRLTRLSPEIVELSEPLQVVRYGEGGHYHAHVDSGPVYPETICSHTKLVANESVPFETSCRQVSPNWGLPSILRPGTPMTQAQPCTVGVPLGMGPGDHWVIPVSDALTSPHKLFTQWLERGGYWSS

SEQ ID NO: 2290 - DNA, 2221 bp, Homo sapien
gcttgctaaccacaaaacccgccaggccggtgcgggagctgcggagcatccgctgcggtcctcgccgagacccccgcgcggattcgccggtccttcccgcgggcgcgacagagctgtcctcgcacctggatgacagcaggggcgccggggtcctctcgacgccagagagaaatctcatcatccgtgcagccttcttaaagcaaactaagaccagagggaggattatccttgacctttgaagaccaaaactaaactgaaatttaaaatgttcttcgggggagaagggagcttgacttacactttgggaatcagaggcaatgagcccgtatatacttcaactcaagaagactgcattaattcttgctgttcaacaaaaaacatatcaggggacaaagcatgtaacttgatgatcttcgacactcgaaaaacagctagacaacccaactgctacctatttttctgtcccaacgaggaagcctgtccattgaaaccagcaaaaggacttatgagttacaggataattacagattttccatctttgaccagaaatttgccaagccaagagttaccccaggaagattctctcttacatggccaattttcacaagcagtcactcccctagcccatcatcacacagattattcaaagcccaccgatatctcatggagagacacactttctcagaagtttggatcctcagatcacttggagaaactatttaagatggatgaagcaagtgcccagctccttgcttataaggaaaaaggccattctcagagttcacaattttcctctgatcaagaaatagctcatctgctgcctgaaaatgtgagtgcgctcccagctacggtggcagttgcttctccacataccacctcggctactccaaagcccgccacccttctacccaccaatgcttcagtgacaccttctgggacttcccagccacagctggccaccacagctccacctgtaaccactgtcacttctcagcctcccacgaccctcatttctacagtttttacacgggctgcggctacactccaagcaatggctacaacagcagttctgactaccacctttcaggcacctacggactcgaaaggcagcttagaaaccataccgtttacagaaatctccaacctaactttgaacacagggaatgtgtataaccctactgcactttctatgtcaaatgtggagtcttccactatgaataaaactgcttcctgggaaggtagggaggccagtccaggcagttcctcccagggcagtgttccagaaaatcagtacggccttccatttgaaaaatggcttcttatcgggtccctgctctttggtgtcctgttcctggtgataggcctcgtcctcctgggtagaatcctctcggaatcactccgcaggaaacgttactcaagactggattatttgatcaatgggatctatgtggacatctaaggatggaactcggtgtcccttaattcatttagtaaccagaagcccaaatgcaatgagtttctgctgacttgctagtcttagcaggaggttgtattttgaagacaggaaaatgcccccttctgctttccttttttttttttggagacagagtcttgctctgttgcccaggctggagtgcagtagcacgatctcggctctcaccgcaacctccgtctcctgggttcaagcgattctcctgcctcagcctcctaagtatctgggattacaggcatgtgccaccacacctgggtgatttttgtatttttagtagagacggggtttcaccatgttggtcaggctggtctcaaactcctgacctagtgatccaccctcctcggcctcccaaagtgctgggattacaggcatgagccaccacagctggcccccttctgttttatgtttggtttttgagaaggaatgaagtgggaaccaaattaggtaattttgggtaatctgtctctaaaatattagctaaaaacaaagctctatgtaaagtaataaagtataattgccatataaatttcaaaattcaactggcttttatgcaaagaaacaggttaggacacctaggttccaattcattcacattcttggttccagataaaatcaactgtttatatcaatttctaatggatttgcttttctttttatatggattcctttaaaacttattccagatgtagttccttccaattaaatatttgaataaatcttttgttactc

SEQ ID NO: 2291 - protein, 397 aa, Homo sapien
MFFGGEGSLTYTLGIRGNEPVYTSTQEDCINSCCSTKNISGDKACNLMIFDTRKTARQPNCYLFFCPNEEACPLKPAKGLMSYRIITDFPSLTRNLPSQELPQEDSLLHGQFSQAVTPLAHHHTDYSKPTDISWRDTLSQKFGSSDHLEKLFKMDEASAQLLAYKEKGHSQSSQFSSDQEIAHLLPENVSALPATVAVASPHTTSATPKPATLLPTNASVTPSGTSQPQLATTAPPVTTVTSQPPTTLISTVFTRAAATLQAMATTAVLTTTFQAPTDSKGSLETIPFTEISNLTLNTGNVYNPTALSMSNVESSTMNKTASWEGREASPGSSSQGSVPENQYGLPFEKWLLIGSLLFGVLFLVIGLVLLGRILSESLRRKRYSRLDYLINGIYVDI

SEQ ID NO: 2292 - DNA, 2732 bp, Homo sapien
gaagagatgccacttggcggccatggcagctgtagtatcggcgactccgggtcaaggcccggtcgagtgcagtaccatgggcagcaccgggtatagggcagagacagctttgtgtcaactttgctgctgaacccctaggacccatcgttagagacctgcaggactcctttcctcatcccaggctcggaggagagtttgctgggactggtgggctggtttcctgctctggggggcggatcaccttcggggccgcctcttggagacaggggcgcctagggaacgaacaggttcgcttgagtcacttacccgccgccgcctaagacattgtgccaccctcaatccgacaatcgaagaaatcgatcattcgcacattttccccattgacttttcccatctctgttaacccacgagaatctaatgactggcatctgagaacccagagcctgggaccttagattgctgtaagctttctctggtgctaatatcagcaaaaagggtctgttgccgggtacgttcaagaggaaggtgcctcgtgaacacatctgctggtgggaaggcctaaagaactggaaagcccactctcttggaaccaccacacctgtttaaagaacctaagcaccatttaaagccactggaaatttgttgtctagtggttgtgggtgaataaaggagggcagaatggatgatttcatctccattagcctgctgtctctggctatgttggtgggatgttacgtggccggaatcattcccttggctgttaatttctcagaggaacgactgaagctggtgactgttttgggtgctggccttctctgtggaactgctctggcagtcatcgtgcctgaaggagtacatgccctttatgaagatattcttgagggaaaacaccaccaagcaagtgaaacacataatgtgattgcatcagacaaagcagcagaaaaatcagttgtccatgaacatgagcacagccacgaccacacacagctgcatgcctatattggtgtttccctcgttctgggcttcgttttcatgttgctggtggaccagattggtaactcccatgtgcattctactgacgatccagaagcagcaaggtctagcaattccaaaatcaccaccacgctgggtctggttgtccatgctgcagctgatggtgttgctttgggagcagcagcatctacttcacagaccagtgtccagttaattgtgtttgtggcaatcatgctacataaggcaccagctgcttttggactggtttccttcttgatgcatgctggcttagagcggaatcgaatcagaaagcacttgctggtctttgcattggcagcaccagttacgtccatggtgacatacttaggactgagtaagagcagtaaagaagccctttcagaggtgaacgccacgggagtggccatgcttttctctgccgggacatttctttatgttgccacagtacatgtcctccctgaggtgggcggaatagggcacagccacaagcccgatgccacgggagggagaggcctcagccgcctggaagtggcagccctggttctgggttgcctcatccctctcatcctgtcagtaggacaccagcattaaatgttcaaggtccagccttggtccagggccgtttgccatccagtgagaacagccggcacgtgacagctactcacttcctcagtctcttgtctcaccttgcgcatctctacatgtattcctagagtccagaggggaggtgaggttaaaacctgagtaatggaaaagcttttagagtagaaacacatttacgttgcagttagctatagacatcccattgtgttatcttttaaaaggcccttgacattttgcgttttaatatttctcttaaccctattctcagggaagatggaatttagttttaaggaaaagaggagaacttcatactcacaatgaaatagtgattatgaaaatacagtgttctgtaattaagctatgtctctttcttcttagtttagaggctctgctactttatccattgatttttaacatggttcccaccatgtaagactggtgctttagcatctatgccacatgcgttgatggaaggtcatagcacccactcacttagatgctaaaggtgattctagttaatctgggattagggtcaggaaaatgatagcaagacacattgaaagctctctttatactcaaaagagatatccattgaaaagggatgtctagagggatttaaacagctcctttggcacgtgcctctctgaatccagcctgccattccatcaaatggagcaggagaggtgggaggagcttctaaagaggtgactggtattttgtagcattccttgtcaagttctcctttgcagaatacctgtctccacattcctagagaggagccaagttctagtagtttcagttctaggctttccttcaagaacagtcagatcacaaagtgtctttggaaattaagggatattaaattttaagtgatttttggatggttattgatatctttgtagtagctttttttaaaagactaccaaaatgtatggttgtcctttttttttgttttttttttttttaattatttctcttagcagatcagcaatccctctagggacctaaatactaggtcagctttggcgacactgtgtcttctcacataaccacctgtagcaagatggatcataaatgagaagtgtttgcctattgatttaaagcttattggaatcatg

SEQ ID NO: 2293 - protein, 307 aa, Homo sapien
MDDFISISLLSLAMLVGCYVAGIIPLAVNFSEERLKLVTVLGAGLLCGTALAVIVPEGVHALYEDILEGKHHQASETHNVIASDKAAEKSVVHEHEHSHDHTQLHAYIGVSLVLGFVFMLLVDQIGNSHVHSTDDPEAARSSNSKITTTLGLVVHAAADGVALGAAASTSQTSVQLIVFVAIMLHKAPAAFGLVSFLMHAGLERNRIRKHLLVFALAAPVTSMVTYLGLSKSSKEALSEVNATGVAMLFSAGTFLYVATVHVLPEVGGIGHSHKPDATGGRGLSRLEVAALVLGCLIPLILSVGHQH

SEQ ID NO: 2294 - DNA, 1726 bp, Homo sapien
tttttccagtgaaacaaaacgtaagaatctgagtttgtttttcaaagatcactaaattttagttatgattatatcacattttccaaaatgtgtggcagtttttgccctccttgctctgagtgttggtgcactggacacttttattgctgcagtatatgagcatgcggtgatattaccaaacagaacagaaacacctgtttcaaaagaagaagctttgctcctgatgaacaagaacatagatgttttggagaaagcagttaagctggcagcgaagcagggtgcacatatcattgtgaccccagaagatggaatctatggttggatcttcaccagggagagcatttacccctatctagaggatataccagaccctggagtgaactggattccatgtagagacccctggagattcggcaacacaccagtgcaacaaagactcagctgcctggccaaggacaactctatctatgtcgtggctaatattggggacaagaagccatgcaatgctagtgactctcagtgtccccctgatggccgttaccaatacaacactgatgtggtgtttgattctcagggaaaactgttggcacgctaccataagtacaatctttttgcacctgaaattcagtttgatttccccaaggattcagaacttgtgacttttgacactccctttgggaagtttggcatttttacttgctttgacattttttctcatgacccagctgcggtggtggtggatgaagtttcaattgacagcattctctaccccacagcatggtacaacacgctgcccctcctctcggctgttcccttccattcagcatgggccaaggccatgggagtcaatctacttgctgcaaatacccacaacaccagcatgcacatgacagggagtggaatctacgccccagaagcagtcaaggtgtaccactatgacatggaaacagagagtggtcagctgttgctatcagaactgaagtctcggccccgccgtgagcccacctaccctgcagctgttgactggcatgcgtatgccagcagtgtcaagccattttcctctgaacagtcagattttctggggatgatttattttgatgagtttaccttcaccaagcttaagagaaatacaggaaattacacagcttgccagaaagatctgtgttgtcacttaacttacaagatgtctgagaagcgaacagacgagatctatgccctaggtgcttttgatggactgcacacagtagaaggccaatattacttacagatatgtgcattactgaagtgtcaaaccactgacctggaaacgtgtggagaacctgtggggtcagcttttaccaagtttgaagacttctccctcagtggcacatttggaacgcgttatgttttcccacagatcattctaagtgggagtcagcttgcccctgaaagacattatgagatttcaagagatggacgcttgaggagccgaagtggagcccctttgcctgtcttagttatggccctgtatggaagagtgtttgagaaggaccctccacgcttagggcagggatctgggaaattccagtgatctcctttagcagagcccttttaggattagcctggctaagaaaggaagaaaaaaaagagatccgttagtgtctgtttagaaaagatgttataaacttacagaaacaaatataataaactgaagcagatttgaaaagcaaaaaaaaaaaaaaaaaaa

SEQ ID NO: 2295 - protein, 501 aa, Homo sapien
MIISHFPKCVAVFALLALSVGALDTFIAAVYEHAVILPNRTETPVSKEEALLLMNKNIDVLEKAVKLAAKQGAHIIVTPEDGIYGWIFTRESIYPYLEDIPDPGVNWIPCRDPWRFGNTPVQQRLSCLAKDNSIYVVANIGDKKPCNASDSQCPPDGRYQYNTDVVFDSQGKLLARYHKYNLFAPEIQFDFPKDSELVTFDTPFGKFGIFTCFDIFSHDPAAVVVDEVSIDSILYPTAWYNTLPLLSAVPFHSAWAKAMGVNLLAANTHNTSMHMTGSGIYAPEAVKVYHYDMETESGQLLLSELKSRPRREPTYPAAVDWHAYASSVKPFSSEQSDFLGMIYFDEFTFTKLKRNTGNYTACQKDLCCHLTYKMSEKRTDEIYALGAFDGLHTVEGQYYLQICALLKCQTTDLETCGEPVGSAFTKFEDFSLSGTFGTRYVFPQIILSGSQLAPERHYEISRDGRLRSRSGAPLPVLVMALYGRVFEKDPPRLGQGSGKFQ

SEQ ID NO: 2296 - DNA, 4414 bp, Homo sapien
cccacgcgtccggcggcggcggtagcggcggcagcggctgcggccaagctgggtccgagcatcccgcggctctggagccgcccggcccggacatggcgaccgtccgggcctctctgcgaggtgcgctgctccttctgctggccgtggcgggggtcgcggaggtggcagggggcctggctccgggcagtgcgggtgcattgtgttgtaatcattcaaaggataaccaaatgtgccgtgatgtatgtgaacagattttctcctcaaaaagtgaatcccgactaaaacatctgttgcagcgagccccagattattgcccagagacaatggttgaaatttggaattgtatgaattcatctttgccaggtgtgtttaagaagtctgatggctgggttggcttaggctgctgtgaactggctattgccttggagtgtcgacaggcatgcaagcaggcatcttcaaagaatgatatttccaaagtttgcagaaaagaatatgagaatgctcttttcagttgcattagcagaaatgaaatgggctcggtttgttgcagttatgcaggtcatcacacaaactgccgagaatactgtcaagccatttttcgaacagactcttctcctggtccatctcagataaaagcagtggaaaattattgcgcctctattagtccacaattaatacattgtgtgaacaattatactcaatcttatccaatgaggaacccaacggatagtttatattgctgtgacagagctgaagaccatgcttgccaaaatgcctgcaagagaatcctgatgtccaagaaaacggaaatggagattgttgatggtctcatcgagggttgtaagacccagcccttgcctcaagatcctctttggcaatgttttcttgaaagctcacaatctgttcaccctggagtcactgtacaccctcctccctctacaggcctcgatggggctaaattgcattgttgttctaaagcaaacacttcaacatgtagggaactctgcactaaactttacagcatgagctggggcaatacacagagttggcaagagtttgatcgcttttgtgaatataatccagtggaagtgtccatgttgacctgtttagcggatgtccgggaaccttgccagttgggctgtagaaaccttacttactgtactaattttaacaacaggccaacagaacttttcaggagttgtaatgcacagtcagatcaaggagccatgaatgacatgaagttgtgggagaaaggaagcataaagatgccatttatcaatatacctgttcttgatattaaaaagtgccagccagagatgtggaaagcaatagcttgttcactgcagattaaaccttgtcatagtaaatctcggggaagtattatttgcaaatcagattgtgtggagattcttaaaaaatgtggagaccagaacaaattccctgaagaccacacagctgaaagtatttgtgagcttctgtcacctacagatgatctgaagaattgtatacctttggatacatacctcaggccaagtactttaggtaacattgtagaagaagtgactcatccctgtaacccaaatccttgccctgccaatgagctctgtgaagtaaaccgaaaaggatgtccatctggagatccctgtcttccatacttttgtgttcaaggttgcaaactgggagaagcttctgatttcattgtccgtcaagggacactaatccaggtgccatcatctgcaggggaagttggttgttataaaatctgttcatgtggacaaagtggactcttagaaaactgtatggaaatgcactgtatagacctccagaagtcttgtattgttggaggaaaaagaaaaagtcatggaacatcctttagtattgactgcaatgtctgttcttgttttgctggcaatttggtgtgctctacccgcctttgcctcagtgagcacagttcagaagatgaccgtcgtaccttcacaggtctgccctgtaactgtgcagatcagtttgtccctgtatgtgggcagaatgggcgcacttaccccagtgcctgcattgctcgctgtgtgggcctccaagaccatcagtttgagtttggatcatgcatgtcaaaggatccatgtaatcctaatccctgccaaaaaaaccaaaggtgcatacccaaaccacaggtctgcctgacgacttttgataaatttggatgtagccagtatgagtgtgtaccaagacagctcgcgtgtgaccaggtccaagatcctgtttgtgacacagaccacatggagcacaacaatctctgcactttataccaaagaggaaaaagcctctcttacaaaggtccctgccagcccttttgcagagcaaccgagcccgtatgtgggcacaatggtgagacctacagcagtgtgtgtgctgcctactcggatcgcgtggcagtcgattactatggggactgccaggccgtcggagtcctctcagagcacagctccgtcgccgagtgtgcttctgtcaagtgtccttcgctcttggcagctggatgcaaacccatcatcccaccgggtgcttgttgcccattatgtgctgggatgttaagagttttatttgacaaagaaaaactggatactattgctaaggtaacaaataaaaagccaataacagttctggaaatacttcagaaaatccgcatgcacgtgtctgtcccacagtgtgatgtgtttggatacttcagcattgaatcagaaattgtgatcctgatcattcccgtcgatcactatccaaaagctctgcagattgaagcctgcaataaagaagcagagaagattgagtcccttatcaactctgacagcccgactttggcgtcccatgtccctctctctgccctcatcatttcccaggtacaggtctccagcagtgtgccatcggccggtgtcagggccaggccttcttgccactccctcctccttcccctcagcttgggccttgccttgcacttgctctggacatataactgactgcccacggaaagtgcagaatgctcctccacctcactctcctgccttgaaaaagacattcaggactgctggtttgtagttgaatattggccaaggaaaggcacatgtcacctctattcgccacacagtatttttttttttaatccgccaatattagtaggatttttgttttgtttttacaaatgttaaaatgtgttgttccaaatactaatgaaaacagaatgtctcttcctggtagaccactgccatatgatttacatttcctcaccataagggtcccccactctaaagcaaatttatcgctgggaaatgagatgaccactttttagaaagataattcactgtactatcaggttcacaaacttcatttcagagttctttttgaagtatttaaggttcccgttgcatttgttttgtttacagataattacctactctggctagaagctaggggtcccagtgaagagccactgccattaaagaatatgaaacatagataaaacatctttgaaattatgtaaattatgtaaattatcaggcaaatttgcattaaattacagaaatttaattcagaaccccaactactgtgttatgcaaaagcaagctgattaaatgacactcatataattatatgttgtaagcaacaggctcactggtcacggatttgtgtctgtgacttttgtgaaagggagaagtgacattgcatcaaagcatcttgcattatgcaatttttatattaaccagatatatattcatcggtattcatccaagttaaatgtagagtttttaaacatcaatctttaaaccaattgctgctacttatataattgccaaaaagtgaaataatgtgtagttcatgtaaataatacattatatttctattttattatgaagaaggtgaatagccatatttgtaaaatgacaatcatgtgtgttaacccagtgctttccattcgtgaaaacacatttgctttttgtgatatgcacaatgtagataagtgttctgtctgactttcttttttgatatagaagtataaagaattgtggtttatatatttaaaagtgtcaagctgagtattaaaatgtatgcatgttgtctaagaaattgaatacttgaatgtgtctcacagtttgaaataagctatttgatgtaatacttcttgtgtgtatgcacatgaaacttagattttacatgaagtattttttcagtattatatgtaccctctgaaatacatagggatatgcgtattataccaaaatgttgctgaaaaatgggcacttaaagctttcagaatatgtcagtgctgatgtagcatgcttgttgcaattgccttttttctgtataaatgtctttaatgcaatatactggaaagcttttctattttaataaaaataatttttatatg

SEQ ID NO: 2297 - protein, 971 aa, Homo sapien
MATVRASLRGALLLLLAVAGVAEVAGGLAPGSAGALCCNHSKDNQMCRDVCEQIFSSKSESRLKHLLQRAPDYCPETMVEIWNCMNSSLPGVFKKSDGWVGLGCCELAIALECRQACKQASSKNDISKVCRKEYENALFSCISRNEMGSVCCSYAGHHTNCREYCQAIFRTDSSPGPSQIKAVENYCASISPQLIHCVNNYTQSYPMRNPTDSLYCCDRAEDHACQNACKRILMSKKTEMEIVDGLIEGCKTQPLPQDPLWQCFLESSQSVHPGVTVHPPPSTGLDGAKLHCCSKANTSTCRELCTKLYSMSWGNTQSWQEFDRFCEYNPVEVSMLTCLADVREPCQLGCRNLTYCTNFNNRPTELFRSCNAQSDQGAMNDMKLWEKGSIKMPFINIPVLDIKKCQPEMWKAIACSLQIKPCHSKSRGSIICKSDCVEILKKCGDQNKFPEDHTAESICELLSPTDDLKNCIPLDTYLRPSTLGNIVEEVTHPCNPNPCPANELCEVNRKGCPSGDPCLPYFCVQGCKLGEASDFIVRQGTLIQVPSSAGEVGCYKICSCGQSGLLENCMEMHCIDLQKSCIVGGKRKSHGTSFSIDCNVCSCFAGNLVCSTRLCLSEHSSEDDRRTFTGLPCNCADQFVPVCGQNGRTYPSACIARCVGLQDHQFEFGSCMSKDPCNPNPCQKNQRCIPKPQVCLTTFDKFGCSQYECVPRQLACDQVQDPVCDTDHMEHNNLCTLYQRGKSLSYKGPCQPFCRATEPVCGHNGETYSSVCAAYSDRVAVDYYGDCQAVGVLSEHSSVAECASVKCPSLLAAGCKPIIPPGACCPLCAGMLRVLFDKEKLDTIAKVTNKKPITVLEILQKIRMHVSVPQCDVFGYFSIESEIVILIIPVDHYPKALQIEACNKEAEKIESLINSDSPTLASHVPLSALIISQVQVSSSVPSAGVRARPSCHSLLLPLSLGLALHLLWTYN

SEQ ID NO: 2298 - DNA, 2059 bp, Homo sapien
gtgtggggaaggtagatgtcattcaagaaccaggtttgagtggccgcttctttgtcaccactctcccagcattttttcatgcaaaggatgggatattccgccgttatcgtggcccaggaatcttcgaagacctgcagaattatatcttagagaagaaatggcaatcagtcgagcctctgactggctggaaatccccggcttctctaacgatgtctggaatggctggtctttttagcatctctggcaagatatggcatcttcacaactatttcacagtgactcttggaattcctgcttggtgttcttatgtctttttcgtcatagccaccttggtttttggcctttttatgggtctggtcttggtggtaatatcagaatgtttctatgtgccacttccaaggcatttatctgagcgttctgagcagaatcggagatcagaggaggctcatagagctgaacagttgcaggatgcggaggaggaaaaagatgattcaaatgaagaagaaaacaaagacagccttgtagatgatgaagaagagaaagaagatcttggcgatgaggatgaagcagaggaagaagaggaggaggacaacttggctgctggtgtggatgaggagagaagtgaggccaatgatcaggggcccccaggagaggacggtgtgacccgggaggaagtagagcctgaggaggctgaagaaggcatctctgagcaaccctgcccagctgacacagaggtggtggaagactccttgaggcagcgtaaaagtcagcatgctgacaagggactgtagatttaatgatgcgttttcaagaatacacaccaaaacaatatgtcagcttccctttggcctgcagtttgtaccaaatccttaatttttcctgaatgagcaagcttctcttaaaagatgctctctagtcatttggtctcatggcagtaagcctcatgtatactaaggagagtcttccaggtgtgacaatcaggatatagaaaaacaaacgtagtgttgggatctgtttggagactgggatgggaacaagttcatttacttaggggtcagagagtctcgaccagaggaggccattcccagtcctaatcagcaccttccagagacaaggctgcaggccctgtgaaatgaaagccaagcaggagccttggctcctgagcatccccaaagtgtaacgtagaagccttgcatccttttcttgtgtaaagtatttatttttgtcaaattgcaggaaacatcaggcaccacagtgcatgaaaaatctttcacagctagaaattgaaagggccttgggtatagagagcagctcagaagtcatcccagccctctgaatctcctgtgctatgttttatttcttacctttaatttttccagcatttccaccatgggcattcaggctctccacactcttcactattatctcttggtcagaggactccaataacagccaggtttacatgaactgtgtttgttcattctgacctaaggggtttagataatcagtaaccataacccctgaagctgtgactgccaaacatctcaaatgaaatgttgtggccatcagagactcaaaaggaagtaaggattttacaagacagattaaaaaaaaattgttttgtccaaaatatagttgttgttgatttttttttaagttttctaagcaatatttttcaagccagaagtcctctaagtcttgccagtacaaggtagtcttgtgaagaaaagttgaatactgttttgttttcatctcaaggggttccctgggtcttgaactactttaataataactaaaaaaccacttctgattttccttcagtgatgtgcttttggtgaaagaattaatgaactccagtacctgaaagtgaaagatttgattttgtttccatcttctgtaatcttccaaagaattatatctttgtaaatctctcaatactcaatctactgtaagtacccagggaggctaatttccttaaaaaaaaaaaatctatccatctacttctctcttacctgatttatgtgttagaataaattcatgaaattcgattccaagcata

SEQ ID NO: 2299 - protein, 193 aa, Homo sapien
MSGMAGLFSISGKIWHLHNYFTVTLGIPAWCSYVFFVIATLVFGLFMGLVLVVISECFYVPLPRHLSERSEQNRRSEEAHRAEQLQDAEEEKDDSNEEENKDSLVDDEEEKEDLGDEDEAEEEEEEDNLAAGVDEERSEANDQGPPGEDGVTREEVEPEEAEEGISEQPCPADTEVVEDSLRQRKSQHADKGL

SEQ ID NO: 2300 - DNA, 3141 bp, Homo sapien
tcaggggtgcagctgcgcaccccacgggatcttgccgaccttgctgcctacactgccctcaagttctacctgcagggcccagagcctgagcctgggcagggtaccgaggatcgctttgtgatgtacatgggcagccgccaggccactggggactacatgggtgtgtctctgcgtgacaagaaggtgcactgggtgtatcagctgggtgaggcgggccctgcagtcctaagcatcgatgaggacattggggagcagttcgcagctgtcagcctggacaggactctccagtttggccacatgtccgtcacagtggagagacagatgatccaggaaaccaagggtgacacggtggcccctggggcagaggggctgctcaacctgcggccagacgacttcgtcttctacgtcggggggtaccccagtaccttcacgccccctcccctgcttcgcttccccggctaccggggctgcatcgagatggacacgctgaatgaggaggtggtcagcctctacaacttcgagaggaccttccagctggacacggctgtggacaggccttgtgcccgctccaagtcgaccggggacccgtggctcacggacggctcctacctggacggcaccggcttcgcccgcatcagcttcgacagtcagatcagcaccaccaagcgcttcgagcaggagctgcggctcgtgtcctacagcggggtgctcttcttcctgaagcagcagagccagttcctgtgcttggccgtgcaagaaggcagcctcgtgctgttgtatgactttggggctggcctgaaaaaggccgtcccactgcagcccccaccgcccctgacctcggccagcaaggcgatccaggtgttcctgctggggggcagccgcaagcgtgtgctggtgcgtgtggagcgggccacggtgtacagcgtggagcaggacaatgatctggagctggccgacgcctactacctggggggcgtgccgcccgaccagctgcccccgagcctgcgatggctcttccccaccggaggctcagtccgtggctgcgtcaaaggcatcaaggccctgggcaagtatgtggacctcaagcggctgaacacgacaggcgtgagcgccggctgcaccgccgacctgctggtggggcgcgccatgactttccatggccacggcttccttcgcctggcgctctcgaacgtggcaccgctcactggcaacgtctactccggcttcggcttccacagcgcccaggacagtgccctgctctactaccgggcgtccccggatgggctatgccaggtgtccctgcagcagggccgtgtgagcctacagctcctgaggactgaagtgaaaactcaagcgggcttcgccgatggtgccccccattacgtcgccttctacagcaatgccacgggagtctggctgtatgtcgatgaccagctccagcagatgaagccccaccggggaccaccccccgagctccagccgcagcctgaggggcccccgaggctcctcctgggaggcctgcctgagtctggcaccatttacaacttcagtggctgcatcagcaacgtcttcgtgcagcggctcctgggcccacagcgcgtatttgatctgcagcagaacctgggcagcgtcaatgtgagcacgggctgtgcacccgccctgcaagcccagaccccgggcctggggcctagaggactgcaggccaccgcccggaaggcctcccgccgcagccgtcagcccgcccggcatcctgcctgcatgctgcccccacacctcaggaccacccgagactcctaccagtttgggggttccctgtccagtcacctggagtttgtgggcatcctggcccgacataggaactggcccagtctctccatgcacgtcctcccgcgaagctcccgaggcctcctcctcttcactgcccgtctgaggcccggcagcccctccctggcgctcttcctgagcaatggccacttcgttgcacagatggaaggcctcgggactcggctccgcgcccagagccgccagcgctcccggcctggccgctggcacaaggtctccgtgcgctgggagaagaaccggatcctgctggtgacggacggggcccgggcctggagccaggaggggccgcaccggcagcaccagggggcagagcacccccagccccacaccctctttgtgggcggcctcccggccagcagccacagctccaaacttccggtgaccgtcgggttcagcggctgtgtgaagagactgaggctgcacgggaggcccctgggggcccccacacggatggcaggggtcacaccctgcatcttgggccccctggaggcgggcctgttcttcccaggcagcgggggagttatcactttagacctcccaggagctacactgcctgatgtgggcctggaactggaggtgcggcccctggcagtcaccggactgatcttccacttgggccaggcccggacgcccccctacttgcagttgcaggtgaccgagaagcaagtcctgctgcgggcggatgacggagcaggggagttctccacgtcagtgacccgcccctcagtgctgtgtgatggccagtggcaccggctagcggtgatgaaaagcgggaatgtgctccggctggaggtggacgcgcagagcaaccacaccgtgggccccttgctggcggctgcagctggtgccccagcccctctgtacctcgggggcctgcctgagcccatggccgtgcagccctggccccccgcctactgcggctgcatgaggaggctggcggtgaaccggtcccccgtcgccatgactcgctctgtggaggtccacggggcagtgggggccagtggctgcccagccgcctaggacacagccaaccccggcccctggtcaggcccctgcagctgcctcacaccgccccttgtgctcgcctcataggtgtctatttggactctaagctctacgggtgacagatcttgtttctgaagatggtttaagttatagcttcttaaacgaaagaataaaatactgcaaaatgtttttatatttggcccttccacccatttttaattgtgagagatttgtcaccaatcatcactggttcctccttaaaaattaaaaagtaacttctgtgtaaaaaaaaaa

SEQ ID NO: 2301 - DNA, 2121 bp, Homo sapien
ctgctcgcggccgccaccgccgggccccggccgtccctggctcccctcctgcctcgagaagggcagggcttctcagaggcttggcgggaaaaaagaacggagggagggatcgcgctgagtataaaagccggttttcggggctttatctaactcgctgtagtaattccagcgagaggcagagggagcgagcgggcggccggctagggtggaagagccgggcgagcagagctgcgctgcgggcgtcctgggaagggagatccggagcgaatagggggcttcgcctctggcccagccctcccgcttgatcccccaggccagcggtccgcaacccttgccgcatccacgaaactttgcccatagcagcgggcgggcactttgcactggaacttacaacacccgagcaaggacgcgactctcccgacgcggggaggctattctgcccatttggggacacttccccgccgctgccaggacccgcttctctgaaaggctctccttgcagctgcttagacgctggatttttttcgggtagtggaaaaccagcagcctcccgcgacgatgcccctcaacgttagcttcaccaacaggaactatgacctcgactacgactcggtgcagccgtatttctactgcgacgaggaggagaacttctaccagcagcagcagcagagcgagctgcagcccccggcgcccagcgaggatatctggaagaaattcgagctgctgcccaccccgcccctgtcccctagccgccgctccgggctctgctcgccctcctacgttgcggtcacacccttctcccttcggggagacaacgacggcggtggcgggagcttctccacggccgaccagctggagatggtgaccgagctgctgggaggagacatggtgaaccagagtttcatctgcgacccggacgacgagaccttcatcaaaaacatcatcatccaggactgtatgtggagcggcttctcggccgccgccaagctcgtctcagagaagctggcctcctaccaggctgcgcgcaaagacagcggcagcccgaaccccgcccgcggccacagcgtctgctccacctccagcttgtacctgcaggatctgagcgccgccgcctcagagtgcatcgacccctcggtggtcttcccctaccctctcaacgacagcagctcgcccaagtcctgcgcctcgcaagactccagcgccttctctccgtcctcggattctctgctctcctcgacggagtcctccccgcagggcagccccgagcccctggtgctccatgaggagacaccgcccaccaccagcagcgactctgaggaggaacaagaagatgaggaagaaatcgatgttgtttctgtggaaaagaggcaggctcctggcaaaaggtcagagtctggatcaccttctgctggaggccacagcaaacctcctcacagcccactggtcctcaagaggtgccacgtctccacacatcagcacaactacgcagcgcctccctccactcggaaggactatcctgctgccaagagggtcaagttggacagtgtcagagtcctgagacagatcagcaacaaccgaaaatgcaccagccccaggtcctcggacaccgaggagaatgtcaagaggcgaacacacaacgtcttggagcgccagaggaggaacgagctaaaacggagcttttttgccctgcgtgaccagatcccggagttggaaaacaatgaaaaggcccccaaggtagttatccttaaaaaagccacagcatacatcctgtccgtccaagcagaggagcaaaagctcatttctgaagaggacttgttgcggaaacgacgagaacagttgaaacacaaacttgaacagctacggaactcttgtgcgtaaggaaaagtaaggaaaacgattccttctaacagaaatgtcctgagcaatcacctatgaacttgtttcaaatgcatgatcaaatgcaacctcacaaccttggctgagtcttgagactgaaagatttagccataatgtaaactgcctcaaattggactttgggcataaaagaacttttttatgcttaccatcttttttttttctttaacagatttgtatttaagaattgtttttaaaaaattttaa

SEQ ID NO: 2302 - protein, 439 aa, Homo sapien
MPLNVSFTNRNYDLDYDSVQPYFYCDEEENFYQQQQQSELQPPAPSEDIWKKFELLPTPPLSPSRRSGLCSPSYVAVTPFSLRGDNDGGGGSFSTADQLEMVTELLGGDMVNQSFICDPDDETFIKNIIIQDCMWSGFSAAAKLVSEKLASYQAARKDSGSPNPARGHSVCSTSSLYLQDLSAAASECIDPSVVFPYPLNDSSSPKSCASQDSSAFSPSSDSLLSSTESSPQGSPEPLVLHEETPPTTSSDSEEEQEDEEEIDVVSVEKRQAPGKRSESGSPSAGGHSKPPHSPLVLKRCHVSTHQHNYAAPPSTRKDYPAAKRVKLDSVRVLRQISNNRKCTSPRSSDTEENVKRRTHNVLERQRRNELKRSFFALRDQIPELENNEKAPKVVILKKATAYILSVQAEEQKLISEEDLLRKRREQLKHKLEQLRNSCA

SEQ ID NO: 2303 - DNA, 1958 bp, Homo sapien
agcagccggcgcggccgccagcgcggtgtagggggcaggcgcggatcccgccaccgccgcgcgctcggcccgccgactcccggcgccgccgccgccactgccgtcgccgccgccgcctgccgggactggagcgcgccgtccgccgcggacaagaccctggcctcaggccggagcagccccatcatgccgagggagcgcagggagcgggatgcgaaggagcgggacaccatgaaggaggacggcggcgcggagttctcggctcgctccaggaagaggaaggcaaacgtgaccgtttttttgcaggatccagatgaagaaatggccaaaatcgacaggacggcgagggaccagtgtgggagccagccttgggacaataatgcagtctgtgcagacccctgctccctgatccccacacctgacaaagaagatgatgaccgggtttacccaaactcaacgtgcaagcctcggattattgcaccatccagaggctccccgctgcctgtactgagctgggcaaatagagaggaagtctggaaaatcatgttaaacaaggaaaagacatacttaagggatcagcactttcttgagcaacaccctcttctgcagccaaaaatgcgagcaattcttctggattggttaatggaggtgtgtgaagtctataaacttcacagggagaccttttacttggcacaagatttctttgaccggtatatggcgacacaagaaaatgttgtaaaaactcttttacagcttattgggatttcatctttatttattgcagccaaacttgaggaaatctatcctccaaagttgcaccagtttgcgtatgtgacagatggagcttgttcaggagatgaaattctcaccatggaattaatgattatgaaggcccttaagtggcgtttaagtcccctgactattgtgtcctggctgaatgtatacatgcaggttgcatatctaaatgacttacatgaagtgctactgccgcagtatccccagcaaatctttatacagattgcagagctgttggatctctgtgtcctggatgttgactgccttgaatttccttatggtatacttgctgcttcggccttgtatcatttctcgtcatctgaattgatgcaaaaggtttcagggtatcagtggtgcgacatagagaactgtgtcaagtggatggttccatttgccatggttataagggagacggggagctcaaaactgaagcacttcaggggcgtcgctgatgaagatgcacacaacatacagacccacagagacagcttggatttgctggacaaagcccgagcaaagaaagccatgttgtctgaacaaaatagggcttctcctctccccagtgggctcctcaccccgccacagagcggtaagaagcagagcagcgggccggaaatggcgtgaccaccccatccttctccaccaaagacagttgcgcgcctgctccacgttctcttctgtctgttgcagcggaggcgtgcgtttgcttttacagatatctgaatggaagagtgtttcttccacaacagaagtatttctgtggatggcatcaaacagggcaaagtgttttttattgaatgcttataggttttttttaaataagtgggtcaagtacaccagccacctccagacaccagtgcgtgctcccgatgctgctatggaaggtgctacttgacctaagggactcccacaacaacaaaagcttgaagctgtggagggccacggtggcgtggctctcctcgcaggtgttctgggctccgttgtaccaagtggagcaggtggttgcgggcaagcgttgtgcagagcccatagccagctgggcagggggctgccctctccacattatcagttgacagtgtacaatgcctttgatgaactgttttgtaagtgctgctatatctatccattttttaataaagataatactgtttttgagacaaaaaaaa

SEQ ID NO: 2304 - protein, 410 aa, Homo sapien
MPRERRERDAKERDTMKEDGGAEFSARSRKRKANVTVFLQDPDEEMAKIDRTARDQCGSQPWDNNAVCADPCSLIPTPDKEDDDRVYPNSTCKPRIIAPSRGSPLPVLSWANREEVWKIMLNKEKTYLRDQHFLEQHPLLQPKMRAILLDWLMEVCEVYKLHRETFYLAQDFFDRYMATQENVVKTLLQLIGISSLFIAAKLEEIYPPKLHQFAYVTDGACSGDEILTMELMIMKALKWRLSPLTIVSWLNVYMQVAYLNDLHEVLLPQYPQQIFIQIAELLDLCVLDVDCLEFPYGILAASALYHFSSSELMQKVSGYQWCDIENCVKWMVPFAMVIRETGSSKLKHFRGVADEDAHNIQTHRDSLDLLDKARAKKAMLSEQNRASPLPSGLLTPPQSGKKQSSGPEMA

SEQ ID NO: 2305 - DNA, 4248 bp, Homo sapien
cccgggctgtgggctacaggcgcagagcgggccaggcgcggagctggcggcagtgacaggaggcgcgaacccgcagcgcttaccgcgcggcgccgcaccatggagcccgccgtgtcgctggccgtgtgcgcgctgctcttcctgctgtgggtgcgcctgaaggggctggagttcgtgctcatccaccagcgctgggtgttcgtgtgcctcttcctcctgccgctctcgcttatcttcgatatctactactacgtgcgcgcctgggtggtgttcaagctcagcagcgctccgcgcctgcacgagcagcgcgtgcgggacatccagaagcaggtgcgggaatggaaggagcagggtagcaagaccttcatgtgcacggggcgccctggctggctcactgtctcactacgtgtcgggaagtacaagaagacacacaaaaacatcatgatcaacctgatggacattctggaagtggacaccaagaaacagattgtccgtgtggagcccttggtgaccatgggccaggtgactgccctgctgacctccattggctggactctccccgtgttgcctgagcttgatgacctcacagtggggggcttgatcatgggcacaggcatcgagtcatcatcccacaagtacggcctgttccaacacatctgcactgcttacgagctggtcctggctgatggcagctttgtgcgatgcactccgtccgaaaactcagacctgttctatgccgtaccctggtcctgtgggacgctgggtttcctggtggccgctgagatccgcatcatccctgccaagaagtacgtcaagctgcgtttcgagccagtgcggggcctggaggctatctgtgccaagttcacccacgagtcccagcggcaggagaaccacttcgtggaagggctgctctactccctggatgaggctgtcattatgacaggggtcatgacagatgaggcagagcccagcaagctgaatagcattggcaattactacaagccgtggttctttaagcatgtggagaactatctgaagacaaaccgagagggcctggagtacattcccttgagacactactaccaccgccacacgcgcagcatcttctgggagctccaggacatcatcccctttggcaacaaccccatcttccgctacctctttggctggatggtgcctcccaagatctccctcctgaagctgacccagggtgagaccctgcgcaagctgtacgagcagcaccacgtggtgcaggacatgctggtgcccatgaagtgcctgcagcaggccctgcacaccttccaaaacgacatccacgtctaccccatctggctgtgtccgttcatcctgcccagccagccaggcctagtgcaccccaaaggaaatgaggcagagctctacatcgacattggagcatatggggagccgcgtgtgaaacactttgaagccaggtcctgcatgaggcagctggagaagtttgtccgcagcgtgcatggcttccagatgctgtatgccgactgctacatgaaccgggaggagttctgggagatgtttgatggctccttgtaccacaagctgcgagagaagctgggttgccaggacgccttccccgaggtgtacgacaagatctgcaaggccgccaggcactgagctggagcccgcctggagagacagacacgtgtgagtggtcaggcatcttcccttcactcaagcttggctgctttcctagatccacactttcaaagagaaacccctccagaactcccaccctgacagcccaacaccaccttcctcctggcttccagggggcagcccagtggaatggaaagaatgtgggatttggagtcagacaagcctgagtccagttccccgtttagaactcattagctgtgtgactctgggtgagtcccttaacccctctgagcccgggtctcttcattagttgaaagggatagtaatacctacttgcaggttgttgtcatctgagttgagcactggtcacattgaaggtgctgggtaagtggtagctcttgttgcttcccgttcagcgtcacatctgcagtggagcctgaaaaggctccacattaggtcacctgtgcacagccatggctggaatgatgaaggggatacgctggagttgccctgccatcgcctccatcagccagacgaggtcctcacaggagaaggacagctcttccccaccctgggatctcaggagggcagccacggagtggggaggccccagatgcgctgtgccaaagccaggtccgaggccaaagttctccctgccatccttggtgccgtcctgccccttcctccttcatgcctgggcctgcaggcccaccccagccaccactgagtccactcggagtgccctgtgttcctggagaaggcattccagggttgaatcttgtcccagcctcagcctgggacacctaggtggagagagtggtctccgctctgaattggatccaggggacctgggctcattcttcttggctcaccaaccctgcaggcctcatctttcccaaaacccactttgtcttggtgggagtgggtccgcgctgctctgcagcaggggctggggagtggacagcatcaggtgggaaagtggagtccaccctcatgtttctgtaggattctcaccgtggggctggaagaaaagagcatcgacttgatttctccaaccactcatccctctttttctttcttccaccactccccaccccagctgtagttaatttcagtgccttacaaatcctaagctcagagaaagttccatttccgttccagagggaagggaacctccctaggtccttccctggcttgttataacgcaaagcttggttgtttatgcaactctatcttaagaactgcccagcctcagctgaaaacccgaatctgagaaggaattgcgtcatgtaagggaagctggaattaagggagctgagccagtcatggttgtggcgtgtgagtcaggagacctaggtttcagcccctctctactgtcagcgagctgtgcaacgtgggcaagtcattgtcctctgagctgcagtttcctcatctgtcacatcgctacagacaagacctccctggaacccttctgattgtcttagacactgtggttgcaaaacccacggaaagcctcatttgtgtggaaagtcagaggaaaaatgatccagtggacacttggggattatctgtcattcaagatccttccttcaaccccaaggccagctcccatctcatttccagaaaggctcatacctggcttgcagggaagcatctgtcttgtcattccaggtgccagaatcctctcagagtcattgaagggtgttcacccatcccacccaaggcttggcacactgccagtgtcttagcagggtcttgtgagggctgggggcatccaggcactcagaaggcaaaggaaccaccctacccatttggcctctggagggggcagaagaaagaaagaaacctcatcctatattttacaaagcatgtgaattctggcattagctctcataggagacccatgtgcttccttgctcagtgcaaaactgatgattctacttgctgtagatgaatggttaacacgagctagttaaacagtgccattgttttgccagtgaagcctccaaccctaagccactgggacggtggccagagatgccagcagcctctgtcgcccttagtcatataaccaaaatccagaccttatccacaacccggggcttggaaaggaaggtattttggaatcacaccctccggttatgttgctccagtaaaatcttgcctggaaagaggcagtcttcttagcatggtgagctgagttcatggcttttttttgtagccagtcctgtccctggccatccatgtgatggttttggatggagttaaacttgatgccagtgggcagtgcatgtggaaagtatcagagtaagcctctcccctccagagccctgagtttcttggctgcatgaaggttttctttagaatcagaattgtagccagtttctttggccagaaggatgaatacttggatattactgaaagggaggggtggagatgggtgtggcagtgtatggtgtgtgatttttattttcttctttggtcatgggggccaaggagaaaggcatgaatcttccctgtcaggctcttacagccacaggcactgtgtctactgtctggaagacatgtccccgtggctgtggggccgctgcttctgtttaaataaaagtggcctgg

SEQ ID NO: 2306 - protein, 516 aa, Homo sapien
MEPAVSLAVCALLFLLWVRLKGLEFVLIHQRWVFVCLFLLPLSLIFDIYYYVRAWVVFKLSSAPRLHEQRVRDIQKQVREWKEQGSKTFMCTGRPGWLTVSLRVGKYKKTHKNIMINLMDILEVDTKKQIVRVEPLVTMGQVTALLTSIGWTLPVLPELDDLTVGGLIMGTGIESSSHKYGLFQHICTAYELVLADGSFVRCTPSENSDLFYAVPWSCGTLGFLVAAEIRIIPAKKYVKLRFEPVRGLEAICAKFTHESQRQENHFVEGLLYSLDEAVIMTGVMTDEAEPSKLNSIGNYYKPWFFKHVENYLKTNREGLEYIPLRHYYHRHTRSIFWELQDIIPFGNNPIFRYLFGWMVPPKISLLKLTQGETLRKLYEQHHVVQDMLVPMKCLQQALHTFQNDIHVYPIWLCPFILPSQPGLVHPKGNEAELYIDIGAYGEPRVKHFEARSCMRQLEKFVRSVHGFQMLYADCYMNREEFWEMFDGSLYHKLREKLGCQDAFPEVYDKICKAARH

SEQ ID NO: 2307 - DNA, 1380 bp, Homo sapien
gtggtgtcgtacatgacacaatgacgtgtttcgggccatatcctattggaactggacttcagggaataaccttgtgttatagttgttttccctccttctgcaagatgaaaagcaggatgtgcatggctatcagcatttgtcagatgctttccatgttgagttttgtggtctgtgctttcaggtacaggcatatgttcaaaaggggttggccaatgggtacatgttgtttgtttctgcccacagctgccccagtgctcagctgtgaagctgcaacacagactgaaaggagactggatctggctgcagtgactctgaggagaggcttgagatctagagcttcgcgatgcagaccgcggtctttgatagatgacaaatcctacatggacaccaagctgctggtggcgaggttcctggagcagtcctcttgtaccatgaccccagacatccatgaacttgtagaaaacattaaatctgttttgaaatctgatgaggagcacatggaggaagccatcacaagtgccagttttctagaacagataatggccccattgcagcccagcacatccagggcccacaagctgcccttgcggagacagcctggcctgctgcacctccagagctgcggcgaccttcacaccatcacaccagcggggaggccccgagccgagaggaggccccggcgagtggaggctgagcggtcacacagcctcattggggtcatccgagagactgtcctgtgaaccctggaagacagaaggtcactccaaggggaaggatccctctcctctctgtcatgtcttggatgggagctgtggcccacctcaaaaaaaaaggagcactctggacacgtgttcccacctgttgggtcccgtgtcttctgactgagggcattcaggagtaaatgcacaggtcggtccaggcccgtctgggtttgggatgcactgagttggaggttatgaaagctttggatcctcttctcctctgctgggcctcgcagcatcccaaggtcacattccctgcatggcagaactggctaatgatctttgccacttcaccctcgtgtctctctttgttgctaagttctttccctcttgggaggacagatctgccggctgctatttatagttgcctttggcctttcactgctctgcgatttggcaggaaataaggcgattaaccctatgtgtccacaagcctcaaaccttgtttcaggtcaccctcaaatcacactctctttaggccaaacaggaaacttcttaagtgacaaaatttaatgccagacatttaaggaggggattattgttgattccatttactcatgcttgccaaactagagacccctaaggcaggactgagaataaacatgtttactttgggccc

SEQ ID NO: 2308 - DNA, 323 bp, Homo sapien
  Unsure 230: Unknown base
ttttttttattgaataaagcagctttgaagcttatcaggcactgcccaacaaaacagtccaaaaaaaatctgttatgaactttttaaccttgggctaacagccaagtactctgtacaagaaaaactgtaaaatatttcatagttttaattctgaagccattttttttttttactggcatcctgtacatttacttttaaaaaaggataacaaaaatgaatattaacaaaantccgggacaacaatatcttcaaggcaacaaaaactggggtggggaagcttattctgaaggtacatttaaaactgaaataacaacttaatgaaa

SEQ ID NO: 2309 - DNA, 4103 bp, Homo sapien
tgtggcgacggcggcagctgtggccccggcgccagcgcccggcacggacagcgcctcttcggtgcactggttccgcaaagggctgcgactccacgacaacccggcgttgctggcggccgtgcgcggggcgcgctgcgtgcgctgcgtttacattctcgacccgtggttcgcggcctcctcctcagtcgggatcaaccgatggaggttcctacttcagtctctggaagatttggacacaagtttaaggaaactgaactcccgcctgtttgtagtccggggacagccagccgacgtgttcccaaggctgttcaaggaatggggagtgacccgcttgacctttgaatatgactctgaaccctttgggaaagaacgggatgcagccatcatgaagatggccaaggaggctggtgtggaagtagtgacggagaattctcataccctctatgacctggacaggatcattgagctgaatgggcagaagccaccccttacatacaagcgctttcaggccatcatcagccgcatggagctgcccaagaagccagtgggcttggtgaccagccagcagatggagagctgcagggccgagatccaggagaaccacgacgagacctacggcgtgccctccctggaggagctggggttccccactgaaggacttggtccagctgtctggcagggaggagagacagaagctctggcccgcctggataagcacttggaacggaaggcctgggttgccaactatgagagaccccgaatgaacgccaactccctcctggccagccccacaggcctcagcccctacctgcgctttggttgtctctcctgccgcctcttctactaccgcctgtgggacctgtataaaaaggtgaagcggaacagcacacctcccctctccctatttgggcaactcctatggcgagagttcttctacacggcagctaccaacaaccccaggtttgaccgcatggaggggaaccccatctgcatccagatcccctgggaccgcaatcctgaggccctggccaagtgggctgagggcaagacaggcttcccttggattgatgccatcatgacccaactgaggcaggagggctggatccaccacctggcccggcatgccgtggcctgcttcctgacccgcggggacctctgggtcagctgggagagcggggtccgggtatttgatgagctgctcctggatgcagatttcagcgtgaacgcaggcagctggatgtggctgtcctgcagtgctttcttccagcagttcttccactgctactgccctgtgggctttggccgtcgcacggaccccagtggggactacatcaggcgatacctgcccaaattgaaagcgttcccctctcgatacatctatgagccctggaatgccccagagtcaattcagaaggcagccaagtgcatcattggtgtggactacccacggcccatcgtcaaccatgccgagaccagccggcttaacattgaacgaatgaagcagatttaccagcagctttcgcgctaccggggactctgtctactggcatctgtcccttcctgtgtggaagacctcagtcaccctgtggcagagcccagctcgagccaggctggcagcatgagcagtgcaggcccaagaccactacccagtggcccagcatcccccaaacgcaagctggaagcagccgaggaaccacctggtgaagaactcagcaaacgggcccgggtggcagagttgccaaccccagagctgccgagcaaggatgcctgagactgcagagcccttgctccgtgagcaaagcctgggtgcccaagcagccaccgcagcagcagagtacaacctgcagagaagctgatcaccgggcagagatagagcgagcatgtgtgtgtgtgtgcgcgtgtgcagaggagggagtggtgtgcctgtttgtgtgtgcatgcatctgttgacactcatgattctgaatgttgcctgggctgggggagtacctgtagcacgccagtgctgtttcccggcctccagacacaaggctcgaggttatggcagtgactttcagctgagacctgttcctgcaagccagctgccttgtctgaacagaacgtagtggtaggaccctagctgggattctggcatctgcctccctagacctccttccctccctcctcacgtcaggctgtggagcaggagcacagcagttctggctgttgtccaaagcatgggattctggaggcagccagagccctgctgagttcctgctttctgacctggaggctgagcaggccggagtggatggatgctgtccagacgtagccacctggcctctgtttcttattttaaaattctctgctactgggctcagtcccaggcccttccttgggcttctgggactgagcatgaggccatagacagatctaaaaagtttccaccaccctacagaagtacacacagatacctgactggtgtggggtatgcctggtactgtaataggagcctaagacagcacacctaccttttcaggatttagaacctaaaattagaaagagaatcccagctgtcattgttccttccccagaagctaagagccagcctcagagcctacccaggagctgtgaaggggcaagggtcaaactgactcactctaccaggaggagaccaggttgcagtggcgtaaggccccctggtttctctggccacactccaaggcaccacagtgctgccagtgaggacagctgacacccagccagggaaaccattctagtctttattctgttggcttccagggcctgtcctggacttgtcagcatccagactgccatgtcagctatcccagtagctgagctccaaggactcaggcagagggactcagggatggggactgccaggggcagttggcaaaagtccaagtagagattacacccagcacaccattccttccaggagcagtaggtgggaggtttgacccagagaagccaatccttgcattccaggagtggcctgtgcctcccacctcttccttcccactgccaaaggcctgtgttgagaaagatgtcatgcaaaaggacgacggtggccaactaaagcaagtcttccttccaccctgtggcctgcacttgagccacaaagtgtgtgtgtgtgtgtgcgtgtgtggtacgtgtgtgtgtgtgtggctatgaggctgattcctgtttggatttttgtcctcacgtgtatcattaagctggcctttgggccttttcctttctacctcccctgtgacctttcctagcctcagatctgttaattcttttggccccagccctgtccctcactgtcctctgtccttggaccagaaccctggggtcagacccatctcctgtagctgtccatcacactgacaggcttcttcctgagatatcctcaggttttctcagccagagagctgcctttagagtccaactgttgtacgtatgtcaccttcactagaaatgtcccatcatcgtgggaggggagcagggcacaggggatggtgtgcattcagagcattgggttgggggcttccctgttccctcagccccagtcgagaggaaagagaatcgggccactgccagaaagagagtcaagcaaacctggaagggcaaatctgagagtgggaaggccaaaggccgaggcccagatttagtattcactagcagcgccttcgggtagcaggatgattccttttcctgcctgtctgctgctggctctcttccctaaggtacaggttggcaggaccacctccgcctacttctccaccatccctagcatgccagcccgttcccagatcaacctgccagtggagtcaggcagtgcactcctggagccaagagggaagggcagggtagagagggtatgtccagtagcctggagctccatggtggcttcatgcctcccttctcccagctcaggtggccctgagggctccctcggaacagtgcctcaaatcctgacccaagggccagcatggggaagagatggttgcaggcaaaatgcactttatagagattttctattgctgggaaggtgtgtttctcccacaatttgtttgtgaatattcacttgttttataaatgtctgacctgtcttg

SEQ ID NO: 2310 - protein, 589 aa, Homo sapien
VATAAAVAPAPAPGTDSASSVHWFRKGLRLHDNPALLAAVRGARCVRCVYILDPWFAASSSVGINRWRFLLQSLEDLDTSLRKLNSRLFVVRGQPADVFPRLFKEWGVTRLTFEYDSEPFGKERDAAIMKMAKEAGVEVVTENSHTLYDLDRIIELNGQKPPLTYKRFQAIISRMELPKKPVGLVTSQQMESCRAEIQENHDETYGVPSLEELGFPTEGLGPAVWQGGETEALARLDKHLERKAWVANYERPRMNANSLLASPTGLSPYLRFGCLSCRLFYYRLWDLYKKVKRNSTPPLSLFGQLLWREFFYTAATNNPRFDRMEGNPICIQIPWDRNPEALAKWAEGKTGFPWIDAIMTQLRQEGWIHHLARHAVACFLTRGDLWVSWESGVRVFDELLLDADFSVNAGSWMWLSCSAFFQQFFHCYCPVGFGRRTDPSGDYIRRYLPKLKAFPSRYIYEPWNAPESIQKAAKCIIGVDYPRPIVNHAETSRLNIERMKQIYQQLSRYRGLCLLASVPSCVEDLSHPVAEPSSSQAGSMSSAGPRPLPSGPASPKRKLEAAEEPPGEELSKRARVAELPTPELPSKDA

SEQ ID NO: 2311 - DNA, 1421 bp, Homo sapien
gaagcgccaagtgcgcatggggacgctatagcaattcgtttgctgtccttcctctccttcgaagatgacaaggcctaccatcgtttcttcctgcctttgggccgtcaggcagttggttgggacccgctccaaccctcggttcttcctgcaatacagtggatacaatttgtcatggctactctgagtgttataggttcaagttcacttattgcctatgctgtattccataatatacagaaatctccagagataagaccacttttttatctgagcttctgtgacctgctcctgggactttgctggctcacggagacacttctctatggagcttcagtagcaaataaggacatcatctgctataacctacaagcagttggacaggtgatagattatacttgtcgagttggtcaaatggcctttgttttctcaagcctgatacctctgctattgatgacacctgtattctgtctgggaaatactagtgaatgtttccaaaacttcagtcagagccacaagtgtatcttgatgcactcaccaccatcagccatggctgaacttccaccttctgccaacacatctgtctgtagcacactttatttttatggtatcgccattttcctgggcagctttgtactcagcctccttaccattatggtcttacttatccgagcccagacattgtataagaagtttgtgaagtcaactggctttctggggagtgaacagtgggcagtgattcacattgtggaccaacgggtgcgcttctacccagtggccttcttttgctgctggggcccagctgtcattctaatgatcataaagctgactaagccacaggacaccaagcttcacatggccctttatgttctccaggctctaacggcaacatctcagggtctactcaactgtggagtatatggctggacgcagcacaaattccaccaactaaagcaggaggctcggcgtgatgcagatacccagacaccattattatgctcacagaagagattctatagcaggggcttaaattcactggaatccaccctgacttttcctgccagtacttctaccattttttgaaactacaatactggaacatccaggaactggagttattctacgctaatggattggaaagaatgttgggaaaggacatcttaaatcttttctaactatgccctaaactgcagaactcaaaggaaatatagtgccattgttagtagtcattctagatgaattgggagtatctctccagttattcccagattcactagtgatccttaaagtctctattcagggagaggaagacactttccatctcagagatagactcgtgttaccttgatggatattggatttgtctaagtctcttctagaaaaaataaattctagattattatttaaaaaaaaaaaaaaaaaaa

SEQ ID NO: 2312 - DNA, 2100 bp, Homo sapien
  Unsure 149, 164: Unknown base
tacttttagatttactgccttcaaaaagtgcctattctgagcaacataaacgttattccttacatatgtatgtacacacggtacccagagtcgtactgtggcagccttcaaaaacataccatcagaaagagtaggtgctgagataaggnaactttgccaaatgnaagaaagtcactcacttccaatatcccctcttcaagcggctaccgtgraasgggctgcaaacacattccctgagcatcccttgctgatacagcttctttatatttatatcctactggatggtagcatattgctaaggtttcctgtactctgcttcaagggaatgtaagytttatggcattgaaacatttaggaaaaaaaaagatgtttaagagaattaatagagccgtagtctgtattaggatgtgtgtcatatgtgtgttctataaactaagcatcggtgggtttagagtgttaaagtgtcagcacattccttctccttttgtctctcaggctaacatgagagaaaatagaaaagtcttggctgtggggattggaagctcagggggccaaatgtccttgccagatccttagagcattactttgactcctaaaaatagtagtgtatgttatttgatggcttttgtttccatagttccatcactgacaaaactgtcaatactgttgatggagcagcagcatagcctagagtgatgcattcttacccagaggtggcaataggagagggtccatgtaaataggacgaggtagacagtgcatgattgtaggagaagggttgaagggaggacatgattccaaaaaagatcgttctcaatgtgtcgtctgactcaaccagctggcagattacacttgccaagtcgttccctttccttctaagtcagttggctccatattcacttgaatatgcctctgtttgggcaaagcaagatacctccacttaacctttatccaaggaagctcttggtgtcctcttggtcataaagttgtctcctacctaacccagttttaccaaatggaagtaaaaggggacaaactatggaagatggactccatgccattgcagtcagccaccattctcttttccatataaggagccccattacataagctacgggtgaggttggaacagctatgtttcataatttcaagagtgtgaccaccctgctctagtcatcatcattggatgaatccagttgactctttggcaaaagggtgatacttttcactaaaaatgcctactcttcctgttgatgttccttttctgtttttaccttgtccaatttccacactagtcattttttttattttttagaggatcagattttagcgctggaaaatgagttcaaaaatttcagtgtaatgtcataaggatgttgggatacagagattttttttttccttggaaacaaatggactgggaagaaacacagcatggctttgctctgagtttcaatctgatgattatgaccatggaagatagtcttatgtaaaggttaaatggtgtttacaagtggatagataaggcggagatggtgagaagccgggttttctctatgctaaatgtgtctactaagagcagcacttcctactagctaagcacaatcatagccccaccgtgatgagctgctagtctgaataacattccctgacttagggaaaggcacacaaaaacatataaagaatatgtctattttcatatgtgtgatactgacagagccatggtattcctaaaatataggtttctcttttttcttgtattcttagcaaattgcatttattcactacattacaaaccatcactgatgtatccaaaatagcacacatagttcagtatgaaaataagagaataaaatctgttataagcaagtgatttaggtattttcttttgtgtttatgcattatctgactatattaaaacctgtttttctatttaccttctatcagttttctctaccaattatgttttttcaatgctctataagaatgaatatggaaattatatttcttttttctgtaaaagagttgcaactactttattatatttagaaatccaataaacttcttattacatttaaaaaaaaaaaaaaaaaactcgaa

SEQ ID NO: 2313 - protein, 32 aa, Homo sapien
  Unsure 149, 164: Unknown amino acid
MVFLKYRFLFFLVFLANCIYSLHYKPSLMYPK

SEQ ID NO: 2314 - DNA, 1540 bp, Homo sapien
cagaatgtcttaacatgagaattgaatttcatgatgtttggttccatttaatagcggacaccaccccaatctcatgttttcctgttaccctaaaacagtggaaggaaactgggtgtttggtagacttctaaatcatggtctctgacaatttgaatctgagattctcacctccatttactaaagaatcgtgacttaattcaaattgcacagtaatcagtaaagtgaatacgtttttaaaatggaattttctcccttcagcaagcactcattaaggagtgaggctgagtattttaagatagagtgagatctgtgagtgattgaaaggtgatatttaaaaacttggatttcattccagtgtcaggtttgggttttaagttcctttggtccagggaagggtccaagcagccacagttgccctaaatctccatcattaagtcttccagcaaggttaagtgcagtatggaaggagaagggggaagaggacggtaacggccccacactccaggctgagaaagagtaattaggaggcctgaggaggggccgaggaaaggctgttggggtgtgctggggttggtacccgagcgccttcccctcacctcaaccagagaagagcatccggttgctttttaaagcttttagcctgccctagcaaggacaaagcatgttagattagagatgcttctgctgatcgcaggggttcttatttgaaaacatctatgatgggggtggggtgggaggagacaggttgtggttatgcaggaaaatcttgtcctaaaaatatatgagtttgggggtaaggggtgggatagccaagcaaaatcagtaattattttaaaatgaacatatgaatttttattaacttttagttaaatacagattttacaacgaggtcagcataagcctaaatctatatagagggctaactcaggcattgtcttgtttatttgtagactggattaaaaacaacctgtcctgttttgtcagttcccagcttcttcgtttagaataaattagaccaaaagaagaaacgtgcttgtctctgtatacccgcagaatgaagttactgttgttaaaaccggattttttcattttactaggttccgaagagtccagatgcttggtagatgttcaatacgtgattttttttttaattgaatgtgttcatttaaaatcctccttaacatttctagaaagacttctttcaataaataatggaatcttagaggaaaagtggttttttaaaagctagggaactcctccactaaaagtaaccattggaaacctcgaatgagggctaaagttttaatcataagagaaaaggcagcataatgaaatgtgtacacatacatagtcagtggtccattttaggaagccagtggcgtctgataaagaaatgttaagagtagtgaggttgaggaaggaaattgtggggatttgaaatattctctttatgttgtttctcttctgagtcatggtaaaacaataaattatcatctctaggtggcaaaaaaaaaaaaaaaaaaaaaaaaaaaaaaaaaaa

SEQ ID NO: 2315 - protein, 64 aa, Homo sapien [sequence omitted]

SEQ ID NO: 2316 - DNA, 951 bp, Homo sapien
atttcggaacgaggactgaagtgggagcggcggcagggtagaagacagaagggggatctatgtggtaactaaagaatgtttctgttttgttaattattgtgtgtgtgtggttttattgtttgcttaagagaatcaaaaactgaaaaaaatgagaatacaggaaatggctcttgtttatttttttgctgtgtttacagcttgttaatgctctactgtctttgtttcaagagagatttgttcactgcccagctcgttttgtgtcctgagccctatgcccagcccaccttataaatcatgcctgtttagatgtttgattttgttctgtttgctattgttatcttaaaggtgtataactctgacatgccagacatcaaattaagctcaaattaagctctcgtttaaatgtttaaacacctaatttatattctaattgatcccagccactgatgcatgtacttcagctacttctgctaaataagcatattaattttccacatcaggccatcagatcttgagaaccaacagttatctagaattccgtgtctactaatgtttcacctgcatgcagccttcattaattttgtagcaaaatataaagtgatcattatgtagtttctggattaaaaaaatttgtgtgtgaagttgctttgtaaagtgcatgtggaattaatgggacagtgtgccctttgtgttagatgttagagcaaaagaaagggcttatagtgttagtattggagcactttgaagatagatattttcagaaaagatgtaggatttaaaagttaaattttaaattttagaaaaagatatgatggcaattggaaatagtcacaatgaagttcttcatccagtaggtgtttaacagtgttattttgccactggtaatgtgtaaactgtgagtgatttacaataaatgattatgaattcaaaaaaaaaaaaaaaaaaactcga

SEQ ID NO: 2317 - protein, 34 aa, Homo sapien
KWLLFIFLLCLQLVNALLSLFQERFVHCPARFVS

SEQ ID NO: 2318 - DNA, 4254 bp, Homo sapien
ggggactacccagagggctgccgccgcctctccaagttcttgtggcccccgcggtgcggagtatggggcgctgatggccatggagggctaccggcgcttcctggcgctgctggggtcggcactgctcgtcggcttcctgtcggtgatcttcgccctcgtctgggtcctccactaccgagaggggcttggctgggatgggagcgcactagagtttaactggcacccagtgctcatggtcaccggcttcgtcttcatccagggcatcgccatcatcgtctacagactgccgtggacctggaaatgcagcaagctcctgatgaaatccatccatgcagggttaaatgcagttgctgccattcttgcaattatctctgtggtggccgtgtttgagaaccacaatgttaacaatatagccaatatgtacagtctgcacagctgggttggactgatagctgtcatatgctatttgttacagcttctttcaggtttttcagtctttctgcttccatgggctccgctttctctccgagcatttctcatgcccatacatgtttattctggaattgtcatctttggaacagtgattgcaacagcacttatgggattgacagagaaactgattttttccctgagagatcctgcatacagtacattcccgccagaaggtgttttcgtaaatacgcttggccttctgatcctggtgttcggggccctcattttttggatagtcaccagaccgcaatggaaacgtcctaaggagccaaattctaccattcttcatccaaatggaggcactgaacagggagcaagaggttccatgccagcctactctggcaacaacatggacaaatcagattcagagttaaacaatgaagtagcagcaaggaaaagaaacttagctctggatgaggctgggcagagatctaccatgtaaaatgttgtagagatagagccatataacgtcacgtttcaaaactagctctacagttttgcttctcctattagccatatgataattgggctatgtagtatcaatatttactttaatcacaaaggatggtttcttgaaataatttgtattgattgaggcctatgaactgacctgaattggaaaggatgtgattaatataaataatagcagatataaattgtggttatgttacctttatcttgttgaggaccacaacattagcacggtgccttgtgcagaatagatactcaatatgtgaatatgtgtctactagtagttaattggataaactggcagcatccctggcctgttgtcatgcagtcatttcctgttaattctgggagacaatgatttcacaactagagggaagcagtcctaaaagtttaaaatccgataaggaatatctgggacagggtttagatcatgactctacacagataccatgatgagagtatattaaagaaatttaggaaagcacctggttcctttctccccatgcctgccttctgctccctccccagctggtttgggctcaaattgtccctggagactagggtttatgttagggtattgatagattagagcaggtggttgaagagatcttctctggtcagacttggaagaatttccaaaagtgaagttagccccaagacttccctagggttgatgtactttatgatccagatgctaaacttcttagaatgaaaatatgcttcaacacttaagtagcatacactgccctacaaacctcagagagcacttttccccaagttcttgtttttatttttgaaagtactcacacagcacttactatgctccaaacactcctctaagcactttacacatattagctcattcagtccccagacagacgggatgaagtaggtattgttactgttcccattttacaggtgagagatttgaagcctggggaggctagtaactcaccccaaggtcacacggctcatacatggtgggactgagactcagatgcaggcagtctggcacctcagtctggattctaaccatttcactaagctatttttgtcttgtactactttgacccacccctgaataaacctcaattgctggagtggggtgtagttattaaagggatgctttttaccttttgctgtctgctgtggcagattccccagataaccaaggaaaaggggccacccatacctggaaataggccatagggcccctactactgccaacaagccatggcctaccttgacacttgtttgatcttaaaattgtgtcttggtaacaaaagatttggacaggcatatctgtagctttcaagttaattaattgcaatatttttttcttcaggattttagctgctgaacaactttcagtttggagctaaaagagacctgtctcatggtctgcccttccctggggcaatagctagggtctttcctgatttttatggaattttaggggatattttgagctttgggttctcagtagtgaattgagacttggaggtgacttttcatgtttggagtatcatctctgtctgggctctgggctgacaaattaaaacctagagtagtgcttatgctgaaatgatacttttcattttttggttgatttttttgccttcccttcaattttaaactgaagcattttaatgtgggtagaaactctacaccaaatacactaaacattttggtgcttagtggatttctttttaggtaactggtacttacttccaaagactgaatacaagccacactccatcatatcccttaaacttcatgaaaaaccattcaagatccccttgctgcaacactgttctcttcttctctactaaattctatttccaaaattggtaatagagccagaaggatccccagtacccagccctctgcctggcacaaagtggtagcacaattaaattcagtatgggtggagcatggtacagtcttggtgccatagaaggagtagttgcatagtcacacatcatttgataagttggatgttccattacatagaggaacacaaaattccagggtttttggaggaagggattagatagcgactaagccgccagaattgaggtggccattcctttttgtataggctaagaaacaggttatcagtgaaaagttaattatggctttggcactagaatagcactgttgcaaagtatttaagcaccccccatctcagccctttattttatctttcatgtgggctaatgtgaggataatcttacagatattataggaatttcttttctatctttatgaaaacaacgtatataaaatatatctagaaaacctttgtttgagactcttatttaatgggcttttgattctaatgataattgtacctttatctttcaaaagctgatatttcctacctaagcatctcccgagaaaaatatctcattaaaaagcccataaataataggggagaagaaagccttaggtatcaattccaaaacagtgattgaaatttcccaaaataattatggcttctgtcatctccagagataatctggcttggtttaccccataatctaatttcagaaaagaaagctttattttaacactcatctgaatcaacattaaagccttttctctcaaagcgtttattgagaaactcaaatgaatatactttttgaattactgtcatcaaaagtgtacggcttcctgtgctgcttgtgtcaaatggaacctgccctctaaagcactttctttcctttacttgcgtggtttcatgtaagctgtgctgtttagaaacaacatctcagactttacaaagaaatgacaaagaaggcaattgcactttttaagggatatcgacaagcagtttctgttttctaaaggacaaaatacagagtgtgtgtcatttttaattagattctttcccctgctgagttggaaattccagtgcagcactgattgaccacagttgccaatctaaaagcacaaagacagaagtaaagctttatgctaattttatttcaatatgatagaaaatttatcttggtatgtccttttttagataactccagcaggaaactgtaactgctatgtctttaggaaaacgtagaagaaagaacattattattctttaattcctacaaggtacttgaaaaccttaagtgaaaaagatttctatctttttatcttggcgcatttatggaaaaaatattaactgtcctgaatattttataattttgtaggaaaaatatgcatctattttttcttgacttcttttatatagtaataaaagttattttggaaaaaaaaaaaaaaaaaaaa

SEQ ID NO: 2319 - protein, 286 aa, Homo sapien
MAMEGYRRFLALLGSALLVGFLSVIFALVWVLHYREGLGWDGSALEFNWHPVLMVTGFVFIQGIAIIVYRLPWTWKCSKLLMKSIHAGLNAVAAILAIISVVAVFENHNVNNIANMYSLHSWVGLIAVICYLLQLLSGFSVFLLPWAPLSLRAFLMPIHVYSGIVIFGTVIATALMGLTEKLIFSLRDPAYSTFPPEGVFVNTLGLLILVFGALIFWIVTRPQWKRPKEPNSTILHPNGGTEQGARGSMPAYSGNNMDKSDSELNNEVAARKRNLALDEAGQRSTM

SEQ ID NO: 2320 - DNA, 874 bp, Homo sapien
  Unsure 468, 501, 546: Unknown base
aggggaatctcggtgctgcgacgagtgtggggccagccgtggaggctccaggtgttctctctgccccagcagagcccggcaggagccccaacaggaagccagcgcggcatggctgccaccgacttcgtgcaggagatgcgcgccgtgggcgagaggctgctgctcaagctgcagagactgccccaggctgagcccgtggagatcgtggccttctcagtcatcatccttttcacagctactgttctgctgttgctgctgatagcctgcagctgctgctgcactcactgctgctgccctgagcggagaggcaggaaggtccaggtgcagccgacaccaccatgacggacgggcgatggctgaggagaagctggagaggagatggccaatgccatgacacaggccatcagcctggccctgcagcccttacccctcaagaccaggctcccctggccccagctctggcccagncccaggtacctggacactgacaacttgagcccntaccaaggaaacaagggctggtataggtgcaaacctctcatctgnccagtggacactgggtgctggggagtcagctgtttcaaagactgggtcaactgcctgggcttcttcgcctacctgcactttttaacaaaacaaggaagtaggggtccccataccttgatggagaacagtccccacctgtgggcaattggcccttggggctctgctgatacatgccaaagaggagcaaggcaatcagaggggctttgtgcaatagcttctgcatccgagctcccgccagagcgtgagcatgtcagtattctagtccagtatttgccagtttccaagtaaaagcttttgtgttaaaaaaaaaaaaaaaaaaaaactcgta

SEQ ID NO: 2321 - protein, 68 aa, Homo sapien
  Unsure 468, 501, 546: Unknown amino acid
MRAVGERLLLKLQRLPQAEPVEIVAFSVIILFTATVLLLLLIACSCCCTHCCCPERRGRKVQVQPTPP

SEQ ID NO: 2322 - DNA, 4114 bp, Homo sapien
gggatgaatggcagcacactgtggtctagtcttctccctgaggaggctcgagatatcacatgtttggagctgatgccaggaagcttggctgaaaccatctgccttgtgacagggacacacaagatgctcagcgcattcaatgcaacgtcagggaaagccatttggactttaaacccaaactacttgtccaacggtaccttggctgccccagttgtggtactgccagacttggatgaagacggtgttcgagaccttgtggttctggccattggggaattgcagccagatctgtgctttctgctggtgtctggccggaccggaaatccagtgggtcgacctgtgaagtacaacatcgttggagttgggaatctgattggtcctcaggtttacatcaccacaaatggggctgtctacatcctgtttggctttggaaatatacaagctgtcgcactgcgggacatttttgttcaggcccaaaatcgagacagctcaccaccttctctgcagatagaagagccagaatgggaaaagcgaagatccatcaacctgtctgagctcattgatgtttacagtgatggtgttgaactactccagatggtgaaggcaccagattccaactgcagcaaccttctgattacaaccagacaaagccttgtgctgcttcgggggcaaaatctgacaccttactgggcattgagacttcaaggcctgcgcagccagcctactcctggatatttcactgatgatcagacattagacttccttctgcagatacaggatggagttgggatgaaaaagatgatggttgtggatggtgactctggctccattgtttggagttaccgtgctccgtgtcacatgaaagaaacgccagccacctcagcagttacttcagaccagaagtctgtcttcctcttctgggccgaagggctgtcagctgcatctcccaattccgatatcatcctaggaactgagccgcccagccttcaccacctttacctcctgcatcctgcgttcccctccatccttctggatctggccaacaccaccggcacagtgacggcttcagaggttggaattaacgacctctggaaagatgccttttatgttaccaggacaacagggccaagctccgaaggccatccagcagccctggtggtcagcaagcttagtctacggtgggcactaatggagggccagatggctcagctacaggagtccacccccaaaattggccgtggggagctgcgaagatttctctctaggataaagtttgttgaagctccctacgagatctaatctgatggaatcttcagttgcagaagaagtgaacagagtggataccctctctactctcctgtcactgtaaaatcagttctatggagagaagacttcttcgtcctcatttaccacctccctgatggttgcaaaggcttgggaaggcatgttggagtctttgacggcagcatgatctatttggctggggcatcttacctaccttttcagtccctgcattaatcccctctaggaactctgcgtggaccgtttggaaatgtgaatctcttaagtatttaatttttttggtatgtctaatttatgaagtcttgctgggaaagccagtgaagtctatgactaggaaacattttgttgtacattgtgctgtgtgtgtgtatattttagtgttgtggtgaagttattttccaggtatgtcctaagcttcagggatccagtttcttgtccttctgaaatatatctggtttgtttggtcattttgagacttccagatgccctacctctgatgttgagggccacttatttctctccttattctttcccacctgtaccttggctacttccaaattgtagacagaatgagaaagatttatagtggaagactgagttagccatccaagcattttcatctctcttgttttatatcctatttccttagattttccatccatgtctattaagtgaccacaagaataactatattcctatcacaaggggagcaagaggatgtagtctcagtgacccatctctgaccaagtccacatgttgtgttatatgtggctctgatggttctgccagtcatgatcttttttctgtggcgacatcagaagtgtatgtttgcatgctgtcttcaacttagaggagaactggaagtcaggagcctttgatgtccttatcctgctgtatgtcttctctgcatctttttctatagggcaccctccttagctcccctcactctgttttctcttctattcagggatatgtttctggactttttcttctgctacttgagtccaggatgcaaccattttgtcctgcatctcttctttcctgtagagcctttgaagcattgtattttgggaaaattcttctgtaaatactataacttttataaatggttaagttatttagaattatctccagtgcttacttctcccttcttctgtataaatctgctacttcaattaagttctcctctaaacttttaggtcattgtttatatagcagaaaattcaatgttagcggatggaaaactgcttcttgaataaccttgataggtcatccctgagtgcacctcaggttctctctttacctgggcttgtatcttttttttttttttttttttttttgagacagagttttgctcttgtcgcccaggctggagtgcagtggcacaatctcggctcactgcaaccttcgcctcctgggttcaagcgattctccagccttagcctcccaagtagctgggactacaggtgcccgctaccatgcctggctaatttttttttttgtatttttagtagagacggggtttcaccatgttggccaggctggtcacgaactcctgacctcagataatccacctgcttctgcctcccaaagtgctgggattacaggcgtgagccaccatgcccggctgggcttgtatcttttagcttgtgttagtaaaaggattctagaaaattatgaagtccagattcaaagggatctctgttaattacccactgacaggcattatgacctaacaggaggttggtagcagtagatccaagcatgcatgttgcctggcctgtagattggccttatcaggtttctgggtgcctctgccttaagatcctgaaggcaaattttgtttcaacagtttggaagtcatctgtgggtccagcttgactttggaggaataagaagatacttctagagtatgggaatgattccagataatttctgggatttgaatctacttgagtttaagggcctgggacctaatttggtttagtatagaatttgaagaattaatttataggcagctgaatacccaaaacttgggtggtggtcctgtggtttggctgagctgtccgggcataacctggttctctgttatgttaaggctttctgggaagccagccactctgcgcaggagtgaaacatgaagttgttttctgaggacctgttttggtgggattgtttgggcagaggactgtgtttatgcagggcaaatcccagaaagataagaggaagctagagaaacttaatgtacctgaattcttcatggtgtatttgcaaactaacttaacatagattcttttgactatggtaagtttgaatctctccttgccaaacaacattataagtttagttttcttcttcctcttgcagccggtacggaaaggtgtaagtggtggctgaaaattgaggaagcttcatctgaccaatgtgggtgctggtttcttgtgaaatgtgtccctaagcctccttctccttgcaggcagccacccacccaggtgtctaagataggacatgctcctttctttctctaatcccatcctgaggttgccggcaaagccaatatgaccactactgagaaatagtaatgacttctacaaatgcaagggtcttaccctcctctttcccttaaacaccctcccttttccttagaccccgtttttgccatcccccaaatgtgtggtatggtgaaactaatcccctgaatgtgaattgctatccttattgccctattaaagaagagccagctggtatattgtcaggaagcactatttaaaatgtgaactgttatagagtaaataaataaatactctacagg

SEQ ID NO: 2323 - DNA, 5287 bp, Homo sapien
ctggccgcggcgtggggacagcgaggcgcactggggcctcccagcgccgggccggccgcgccgtccagcccgaggtctacggctttgcgctccgagcccagaggaagatgcctgccggcaccgagctcgggctgcggggctgaacgcctgtcttccaggcgcacggcagcactgccctcggccggtgtcggtagcggcactcggcgtgccccgggcggacgaagagcgcaggctgggtacaccttgcccgaatcggcggagttcgcagctagcgagggcgggccggccggcccggatgggcgcggggtttgcggcccccgccgggtgctccggagcggcccgggcaccgggggcacgctgagtgccggagccgcggccgcagagagaacttggggcgggggccatgcaccggtgcggagtctagagccgagcggagcgccccgcgggcccgcccgcgtctgcggccgttcgggtcctcacagtccccgcgcccggagttcgcagcgcgctccagacaagatggcgcggccggtccggggagggctcggggccccgcgccgctcgccttgccttctccttctctggctgcttttgcttcggctggagccggtgaccgccgcggccggcccgcgggcgccctgcgcggccgcctgcacttgcgctggggactcgctggactgcggtgggcgcgggctggctgcgttgcccggggacctgccctcctggacgcggagcctaaacctgagttacaacaaactctctgagattgaccctgctggttttgaggacttgccgaacctacaggaagtgtacctcaataataatgagttgacagcggtaccatccctgggcgctgcttcatcacatgtcgtctctctctttctgcagcacaacaagattcgcagcgtggaggggagccagctgaaggcctacctttccttagaagtgttagatctgagtttgaacaacatcacggaagtgcggaacacctgctttccacacggaccgcctataaaggagctcaacctggcaggcaatcggattggcaccctggagttgggagcatttgatggtctgtcacggtcgctgctaactcttcgcctgagcaaaaacaggatcacccagcttcctgtaagagcattcaagctacccaggctgacacaactggacctcaatcggaacaggattcggctgatagagggcctcaccttccaggggctcaacagcttggaggtgctgaagcttcagcgaaacaacatcagcaaactgacagatggggccttctggggactgtccaagatgcatgtgctgcacctggagtacaacagcctggtagaagtgaacagcggctcgctctacggcctcacggccctgcatcagctccacctcagcaacaattccatcgctcgcattcaccgcaagggctggagcttctgccagaagctgcatgagttggtcctgtccttcaacaacctgacacggctggacgaggagagcctggccgagctgagcagcctgagtgtcctgcgtctcagccacaattccatcagccacattgcggagggtgccttcaagggactcaggagcctgcgagtcttggatctggaccataacgagatttcgggcacaatagaggacacgagcggcgccttctcagggctcgacagcctcagcaagctgactctgtttggaaacaagatcaagtctgtggctaagagagcattctcggggctggaaggcctggagcacctgaaccttggagggaatgcgatcagatctgtccagtttgatgcctttgtgaagatgaagaatcttaaagagctccatatcagcagcgacagcttcctgtgtgactgccagctgaagtggctgcccccgtggctaattggcaggatgctgcaggcctttgtgacagccacctgtgcccacccagaatcactgaagggtcagagcattttctctgtgccaccagagagtttcgtgtgcgatgacttcctgaagccacagatcatcacccagccagaaaccaccatggctatggtgggcaaggacatccggtttacatgctcagcagccagcagcagcagctcccccatgacctttgcctggaagaaagacaatgaagtcctgaccaatgcagacatggagaactttgtccacgtccacgcgcaggacggggaagtgatggagtacaccaccatcctgcacctccgtcaggtcactttcgggcacgagggccgctaccaatgtgtcatcaccaaccactttggctccacctattcacataaggccaggctcactgtgaatgtgttgccatcattcaccaaaacgccccacgacataaccatccggaccaccaccatggcccgcctcgaatgtgctgccacaggtcacccaaaccctcagattgcctggcagaaggatggaggcacggatttccccgctgcccgtgagcgacgcatgcatgtcatgccggatgacgacgtgtttttcatcactgatgtgaaaatagatgacgcaggggtttacagctgtactgctcagaactcagccggttctatttcagctaatgccaccctgactgtcctagagaccccatccttggtggtccccttggaagaccgtgtggtatctgtgggagaaacagtggccctccaatgcaaagccacggggaaccctccgccccgcatcacctggttcaagggggaccgcccgctgagcctcactgagcggcaccacctgacccctgacaaccagctcctggtggttcagaacgtggtggcagaggatgcgggccgatatacctgtgagatgtccaacaccctgggcacggagcgagctcacagccagctgagcgtcctgcccgcagcaggctgcaggaaggatgggaccacggtaggcatcttcaccattgctgtcgtgagcagcatcgtcctgacgtcactggtctgggtgtgcatcatctaccagaccaggaagaagagtgaagagtacagtgtcaccaacacagatgaaaccgtcgtgccaccagatgttccaagctacctctcttctcaggggaccctttctgaccgacaagaaaccgtggtcaggaccgagggtgcgggccctcaggccaatgggcacattgagagcaatggtgtgtgtccaagagatgcaagccactttccagagcccgacactcacagcgttgcctgcaggcagccaaagctctgtgctgggtctgcgtatcacaaagagccgtggaaagcgattgagaaagctgaagggacacctgggccacataagatggaacacggtggccgggtcgtatgcagtgactgcaacaccgaagtggactgttactccaggggacaagccttccacccccagcctgtgtccagagacagcgcacagccaagtgcgccaaatggcccggagccgggtgggagtgaccaagagcattctccacatcaccagtgcagcaggactgccgctgggtcctgccccgagtgccaagggtcgctctaccccagtaaccacgatagaatgctgacggctgtgaagaaaaagccaatggcatctctagatgggaaaggggattcttcctggactttagcaaggttgtatcacccggactctacagagctacagcctgcatcttcattaacttcaggcagtccagagcgcgcggaagcccagtacttgcttgtttccaatggccacctccccaaagcatgtgacgccagtcccgagtccacgccactgacaggacagctccccgggaaacagagggtgccactgctgttggcaccaaaaagctaggttttgtctacctcagttcttgtcataccaatctctacgggaaagagaggtaggagaggctgcgaggaagcttgggttcaagcgtcactcatctgtacatagttgtaactcccatgtggagtatcagtcgctcacaggacttggatctgaagcacagtaaacgcaagaggggatttgtgtacaaaaggcaaaaaaagtatttgatatcattgtacataagagttttcagagatttcatatatatcttttacagaggctattttaatctttagtgcatggttaacagaaaaaaattatacaattttgacaatattatttttcgtatcaggttgctgtttaattttggagggggtggggaaatagttctggtgccttaacgcatggctggaatttatagaggctacaaccacatttgttcacaggagtttttggtgcgggtggggaaggatggaaggccttggatttatattgcacttcatagacccctaggctgctgtgcggtgggactccacatgcgccggaaggagcttcaggtgagcactgctcatgtgtggatgcccctgcaacaggcttccctgtctgtagagccaggggtgcaagtgccatccacacttgcagtgaatggcttttccttttaggtttaagtcctgtctgtctgtaaggcgtagaatctgtccgtctgtaaggcgtagaatgagggttgttaatccatcacaagcaaaaggtcagaacagttaaacactgcctttcctcctcctcttattttatgataaaagcaaatgtggccttctcagtatcattcgattgctatttgagacttttaaattaaggtaaaggctgctggtgttggtacctgtggatttttctatactgatgttttcgttttgccaatataatgagtattacattggccttgggggacagaaaggaggaagttctgacttttcagggctaccttatttctactaaggacccagagcaggcctgtccatgccattccttcgcacagatgaaactgagctgggactggaaaggacagcccttgacctgggttctgggtataatttgcacttttgagactggtagctaaccatcttatgagtgccaatgtgtcatttagtaaaacttaaatagaaacaaggtccttcaaatgttcctttggccaaaagctgaagggagttactgagaaaatagttaacaattactgtcaggtgtcatcactgttcaaaaggtaagcacatttagaattttgttcttgacagttaactgactaatcttacttccacaaaatatgtgaatttgctgcttctgagaggcaatgtgaaagagggagtattacttttatgtacaaagttatttatttatagaaattttggtacagtgtacattgaaaaccatgtaaaatattgaagtgtctaacaaatggcattgaagtgtctttaataaaggttcatttataaatgtcaaaaaaaaaaaaaaaaaa

SEQ ID NO: 2324 - protein, 1094 aa, Homo sapien
MARPVRGGLGAPRRSPCLLLLWLLLLRLEPVTAAAGPRAPCAAACTCAGDSLDCGGRGLAALPGDLPSWTRSLNLSYNKLSEIDPAGFEDLPNLQEVYLNNNELTAVPSLGAASSHVVSLFLQHNKIRSVEGSQLKAYLSLEVLDLSLNNITEVRNTCFPHGPPIKELNLAGNRIGTLELGAFDGLSRSLLTLRLSKNRITQLPVRAFKLPRLTQLDLNRNRIRLIEGLTFQGLNSLEVLKLQRNNISKLTDGAFWGLSKMHVLHLEYNSLVEVNSGSLYGLTALHQLHLSNNSIARIHRKGWSFCQKLHELVLSFNNLTRLDEESLAELSSLSVLRLSHNSISHIAEGAFKGLRSLRVLDLDHNEISGTIEDTSGAFSGLDSLSKLTLFGNKIKSVAKRAFSGLEGLEHLNLGGNAIRSVQFDAFVKMKNLKELHISSDSFLCDCQLKWLPPWLIGRMLQAFVTATCAHPESLKGQSIFSVPPESFVCDDFLKPQIITQPETTMAMVGKDIRFTCSAASSSSSPMTFAWKKDNEVLTNADMENFVHVHAQDGEVMEYTTILHLRQVTFGHEGRYQCVITNHFGSTYSHKARLTVNVLPSFTKTPHDITIRTTTMARLECAATGHPNPQIAWQKDGGTDFPAARERRMHVMPDDDVFFITDVKIDDAGVYSCTAQNSAGSISANATLTVLETPSLVVPLEDRVVSVGETVALQCKATGNPPPRITWFKGDRPLSLTERHHLTPDNQLLVVQNVVAEDAGRYTCEMSNTLGTERAHSQLSVLPAAGCRKDGTTVGIFTIAVVSSIVLTSLVWVCIIYQTRKKSEEYSVTNTDETVVPPDVPSYLSSQGTLSDRQETVVRTEGAGPQANGHIESNGVCPRDASHFPEPDTHSVACRQPKLCAGSAYHKEPWKAIEKAEGTPGPHKMEHGGRVVCSDCNTEVDCYSRGQAFHPQPVSRDSAQPSAPNGPEPGGSDQEHSPHHQCSRTAAGSCPECQGSLYPSNHDRMLTAVKKKPMASLDGKGDSSWTLARLYHPDSTELQPASSLTSGSPERAEAQYLLVSNGHLPKACDASPESTPLTGQLPGKQRVPLLLAPKS

SEQ ID NO: 2325 - DNA, 1038 bp, Homo sapien
ccacgcgtccgagacatttaaactagattcccagtcctctccttcaaaagcttggtctttgtttttcctatagggaaaaaagtcaaaataagttccaaaaactatcctcaaagtagtattgtgcttgtagtaaatgaaggttggatggatggatactgacaatggtggcaggcatttcaagccttttaaattagtactttttgtcgtcttgcttattaaaattttgttaattttagcaaagaccaattgttgtgataaactggtgttttttggatgcttcaagcacacgttaaccaattttttaattccccttttggttcctcccattgttctaaaataggactttcatattattaaaacctcaaaagatgatccacccaggatgaacaaagatcaccaaggggaaagaaaacattttttatctttacagaaaacatgttaagattatatatagatgtattctttacattggatattgtattagagtcctccttacaagaaatgaaatagtttttagcactcttagcattagagttcctagattggtgttgatagctacagttttaaaatgtataacctgaaaatgaaggttaattttgcattgtaagagcacatttgatctatgtaaaaagtgtccatttggtgtatttttttaaaaaagagaaagcactttcatattaagtagcatgtgtatgaatttagattttcatatttgttgtgtctgtattcagtgaagtaaattgagcatttaaatgtttgttgatggcaacattaactattaaattaaagcaccttatactctgctgcttaacttgcttgtaattgcacctttgttacctgcacattttcatatagaatattgttgtaacattgcttcatgtgggtctggatggaagattagtgggcctacaggatcatttatttatattgtttatattacaataatatattgtagatcagttgtaagttcatttctttacaaataaaagcctcttccatttgaaaaaaaaaaaaaaaaaaaaaaaaaaaaaaaaaaaa

SEQ ID NO: 2326 - protein, 63 aa, Homo sapien [sequence omitted]

SEQ ID NO: 2327 - DNA, 805 bp, Homo sapien
ggcacgaggtccctaattgtcttgtacctagccctagggtgaccagggcaggggaatcatggcgagaagcgtaagggcctgatgaagaaggtgtgctgggtgtgggctctagcccacttggttttgtgtgagaggtggctgacagcaggttgtttgctgtatgtaggagttatccagccctgcaagggcagtccctccagtgtctgcaaagcccgaagatgtctgcatccaaaatacagaataaaaagatatggttactacaagtactcagtaagactgataatctgtcatcatcatcctcatgcccttaaagcagagctaactgatgattaatatatgcttctatgttaacagtcttggactttattaatggtgggtggaagttaacttaatgtatgtatgcaaactaaaaagtggcatccttttcattaatgacccaaccattattcaagagctatgtctagttagggacttcagacttttgaaagaaatgaagaaataatgccagatacatgggctcgcacttggaatcccagctacttgggggaccgaggtgggaggaccgcttgagcccaggagttcgagaccagcctgggcaacatagcgaaaccctgcctcagttttaaaaaagaaaaaaagaagtagtgaagaaattggaaaggattctgagaagaaatatgcaaggtggaaaagagcctagaaagaaaggtgacagatgctgggatttggtcgtcagaagagatatctaggaaatagcatggcagccctcaagtactagctccacttaaaaaaaaaaaaaaaaaaa

SEQ ID NO: 2328 - protein, 83 aa, Homo sapien
MKKVCWVWALAHLVLCERWLTAGCLLYVGVIQPCKGSPSSVCKARRCLHPKYRIKRYGYYKYSVRLIICHHHPHALKAELTDD

SEQ ID NO: 2329 - DNA, 1888 bp, Homo sapien
gcggcgcggggcgggcgcagcgggggtcggggcgctgggagcccgttgggccgcgaacgcagccgccacgccggggccgccgagatcgggtgcccgggatgagcctcatccggaaaaagggcttctacaagcaggacgtcaacaagaccgcctgggagctgcccaagacctacgtgtccccgacgcacgtcggcagcggggcctatggctccgtgtgctcggccatcgacaagcggtcaggggagaaggtggccatcaagaagctgagccgaccctttcagtccgagatcttcgccaagcgcgcctaccgggagctgctgctgctgaagcacatgcagcatgagaacgtcattgggctcctggatgtcttcaccccagcctcctccctgcgcaacttctatgacttctacctggtgatgcccttcatgcagacggatctgcagaagatcatggggatggagttcagtgaggagaagatccagtacctggtgtatcagatgctcaaaggccttaagtacatccactctgctggggtcgtgcacagggacctgaagccaggcaacctggctgtgaatgaggactgtgaactgaagattctggattttgggctggcgcgacatgcagacgccgagatgactggctacgtggtgacccgctggtaccgagcccccgaggtgatcctcagctggatgcactacaaccagacagtggacatctggtctgtgggctgtatcatggcagagatgctgacagggaaaactctgttcaaggggaaagattacctggaccagctgacccagatcctgaaagtgaccggggtgcctggcacggagtttgtgcagaagctgaacgacaaagcggccaaatcctacatccagtccctgccacagacccccaggaaggatttcactcagctgttcccacgggccagcccccaggctgcggacctgctggagaagatgctggagctagacgtggacaagcgcctgacggccgcgcaggccctcacccatcccttctttgaacccttccgggaccctgaggaagagacggaggcccagcagccgtttgatgattccttagaacacgagaaactcacagtggatgaatggaagcagcacatctacaaggagattgtgaacttcagccccattgcccggaaggactcacggcgccggagtggcatgaagctgtagggactcatcttgcatggcaccaccggccagacactgcccaaggaccagtatttgtcactaccaaactcagcccttcttggaatacagcctttcaagcagaggacagaagggtccttctccttatgtgggaaatgggcctagtagatgcagaattcaaagatgtcggttgggagaaactagctctgatcctaacaggccacgttaaactgcccatctggagaatcgcctgcaggtggggccctttccttcccgccagagtggggctgagtgggcgctgagccaggccgggggcctatggcagtgatgctgtgttggtttcctagggatgctctaacgaattaccacaaacctggtggattgaaacagcagaacttgattcccttacagttctggaggctggaaatctgggatggaggtgttggcagggctgtggtccctttgaaggctctggggaagaatccttccttggctctttttagcttgtggcggcagtgggcagtccgtggcattccccagcttattgctgcatcactccagtctctgtctcttctgttctctcctcttttaacaacagtcattggatttagggcccaccctaatcctgtgtgatcttatcttgatccttattaattaaacctgcaaatactctagttccaaataaagtcacattctcaggttccaggtggacatga

SEQ ID NO: 2330 - protein, 365 aa, Homo sapien
MSLIRKKGFYKQDVNKTAWELPKTYVSPTHVGSGAYGSVCSAIDKRSGEKVAIKKLSRPFQSEIFAKRAYRELLLLKHMQHENVIGLLDVFTPASSLRNFYDFYLVMPFMQTDLQKIMGMEFSEEKIQYLVYQMLKGLKYIHSAGVVHRDLKPGNLAVNEDCELKILDFGLARHADAEMTGYVVTRWYRAPEVILSWMHYNQTVDIWSVGCIMAEMLTGKTLFKGKDYLDQLTQILKVTGVPGTEFVQKLNDKAAKSYIQSLPQTPRKDFTQLFPRASPQAADLLEKMLELDVDKRLTAAQALTHPFFEPFRDPEEETEAQQPFDDSLEHEKLTVDEWKQHIYKEIVNFSPIARKDSRRRSGMKL

SEQ ID NO: 2331 - DNA, 4415 bp, Homo sapien
gaccgcggctgcaggaacggaggcggaaggggccctgcggcgacgacgtcgtcgacgggggtggccgtgggagctgagcacggagaagactccctctctcggaagccggatcccgagccgggcaggatggatcaccaccagccggggactgggcgctaccaggtgcttcttaatgaagaggataactcagaatcatcggctatagagcagccacctacttcaaacccagcaccgcagattgtgcaggctgtgtcttcagcaccagcacttgaaactgactcttcccctccaccatatagtagtattactgtggaagtacctacaacttcagatacagaagtttacggtgagttttatcccgtgccacctccctatagcgttgctacctctcttcctacatacgatgaagctgagaaggctaaagctgctgcaatggcagctgcagcagcagaaacatctcaaagaattcaggaggaagagtgtccaccaagagatgacttcagtgatgcagaccagctcagagtggggaatgatggcattttcatgctggcatttttcatggcatttattttcaactggcttggattttgtttatccttctgtatcaccaataccatagctggaaggtatggtgctatctgcggatttggcctttccttgatcaaatggatccttattgtcaggttttctgattattttactggatatttcaatggacagtattggctttggtggatatttcttgtacttggcctgctccttttcttcagaggatttgttaattatctaaaagtcagaaacatgtctgaaagtatggcagctgctcatagaacaaggtatttcttcttattgtagagactgcatcaacccgacattcctttcttataccaatgtgaaatttccagatcatctgtaaacctacaactttaatagaagactactaataacagaagacaaattagtgaagaaaagacggagtttcgaaattgaatggcagggtggtttttgcttacaagccatttctgttcattctttaagtatctatatttcatttgttttgcacatatgcatatgtgcccatttaagatatttgcatatacttgatagaaaccataaagttgtagcagttaagtccagtcacatttggttaatcagtgtttgatataattgaaagagttgagtggataaacagtcttccagcttgtaaatgccattgacttctgacctgacatttagtataataaaaatgaaattcttaaccatgtcaaatgatttagtttctggctcttagactcatctggcagttctacacatgaaacatcttttgttatataaggtgtattgaaacctgcagtgctgattattagaaaggatttgtcggatttttgaacatgatatttacattattatttaggaaaactcttcctgtaaataaccatgcataacttactttctgcaatgttttcttagaaattgtgtccagatagctttcactaattttaaattaagtgaactaaatatatatgtgtatatgtatacacatatatatacacacacacatatatatatttagaaacgtgagtgttaaagatagaatttgttttaggacaaattttaagaaaatgtgggaataccaaatgtcctttataagaaaaataaattttgttttaagggacataccagttttagggattttcagatgggaagctgcatttttaggattgcccatcttaagagatcttgcaggaagagattgtattagatattatatttatttcatttaagataattttcaaagttaattttctaaataagataattctcatttgtgtttgtcttttaaaaggccaataaaatatctttcagtatcattgtaataattttttagagtttaatttgtaaagcttagcaaataaaatcttgtactatgaatagcttcttgctttatgactttaggattaacttgtaaaaaacatatcctgaactgagatatgcaaaatactcattttcaagttatggaaatgtgtttgtggcatataggactgtggggtctgtgtgtgtagtgagagtgtgtagccactattataactggaatttaatttacattcataaactactatatttcccatcttgcaaatcattttatgtctcatctgtttttcctttcggttatatctttggttttgaataccaacatttaaaatgatggtattttatcttttaaacttaaaaattatttaatacagctatatggaccttataaaattgatttcttatttattattagacattactactaaaaggtacatctaactattcagggacatttttccatttccaaaaaataaaatttattatgctttataacctcttctgtattttctaattttttcattgtctttgataaataaaacagttttgttttgctaatatagcctattttttgttttgtctcattcagtttactttcctgcgtagaatttttattgttatattaaaatttttattgttgtattaaagtacctgtgttacaccccttgaagtaagacagtagcatggggtaaagaaaaaatatttagtttagttgcctaatttggaagttaattaaaattaaactgtactaataacatattcaaactcatgctggatctctttcatattaatttcttatagacctgtactttattctttcaataatttttaaatgaaattaagctttgctacatggtaattaaataattactaggaagcttagctatcaaacatcgacttactaaaatttcattttagcttttatggtatatgtgcttgttttctgaatatggatacatgttacttttgatccagcatcaaaacttcactttttgttttgacttttccccccaaatctgtaaggttcaagtatacatattactgaatcctctataattggcataattcaatggtagccttaaatctcatcatgtaagcaggggaatcagaatgttattttcaagaacttaatgttcccttcagatatataaaatcctgcatacttcatttcctgtgagcttgaacagctgctgttgtgttttggggatgcttgatcatctttgcactctgccttaaagattgaaaaatcaaaactcttgttagggtatctaaacatttttgagtgtgaactggggattggaagttaatacaaaaaaatttcaaattatttctattgtaaatgaataagctagtcatggctaggataatccattttcatgtatttatgcaataaactgaattttaaggcaaaaacaacacttttctatatagtgtatgcaggacagattttagaaacttagattaaaatacaaatcccattacatttggttaaaatgaatctctgcttaatggaaaaaatactaatctttagcctattttgagtctataagatatatttcattttagacatgccttctaagttgttcacagatttttacctgctaaaacaatattatttccagtaaaacctctcctaacaggaaaagtggagttcaaaatatccaattggagaaaaattcagagttccttcattaaatataatttttttcatctagtatgtactatttcaagaagtgcaaaaagtaatgatagtgaatgtgataccatacttaactaaggtaatatatatccttagtttgctcaaaagagtcctggttattcctgttttctcagcttaatagtgcctcatcgtactctcaaaagtgttctaatttggaggataagttatatgatcatcctgtgtataattgtagactgtaccaagaagcaactaccttagctccactgccctttgagggatggaactggggtaagggcaggagccagttattattgccacagtgttttctaatgaaccatttggcctgtagaagaggaatagtattttttttaatagttgtatttgaatgattccagcttatcgtaaatactaaactgaatggcttttatatttttaactgctgttaaatgttattttagcatttattagttgtttattatttaattcttcaaatagtcatatgaaaacatatatttgataaaggtcaattgttagatgataatgtgccattcattatcataggaatgtccttgcccatatataaaacatgctggcatgtattttacttgttaataaagttgtatagatgtggaagtgtgaacctgtgatgcatccttttcaaaatcagtttaagattcgcatattatcatgactgtgacctcactaaactgtttatgtgacaaacctttcaagattggagatgaaaacaacacttgtgaaattaggttggggttgcaacatcttttaacttctcagttatttgtatgtcaggaaacagattgtggtttaattttaataaacaaaatatcatctttttgaaaat

SEQ ID NO: 2332 - protein, 284 aa, Homo sapien
DRGCRNGGGRGPAATTSSTGVAVGAEHGEDSLSRKPDPEPGRMDHHQPGTGRYQVLLNEEDNSESSAIEQPPTSNPAPQIVQAVSSAPALETDSSPPPYSSITVEVPTTSDTEVYGEFYPVPPPYSVATSLPTYDEAEKAKAAAMAAAAAETSQRIQEEECPPRDDFSDADQLRVGNDGIFMLAFFMAFIFNWLGFCLSFCITNTIAGRYGAICGFGLSLIKWILIVRFSDYFTGYFNGQYWLWWIFLVLGLLLFFRGFVNYLKVRNMSESMAAAHRTRYFFLL

SEQ ID NO: 2333 - DNA, 2831 bp, Homo sapien
ggcacgaggtagtggcgggaggctgtgagctgagcggtggggtctgcgtacgcctggagtccttccccgctgtgctcagcatggaccctatccggagcttctgcgggaagctgcggtctctggccagcacgctggactgcgagacggcccggctgcagcgagcgctggacggagaggaaagcggatgatgttaatattcttcttgataaagcaagattggaaaatcaagaaggcattgatttcataaaggcaacaaaagtactaatggaaaaaaattcaatggatattatgaaaataagagagtatttccagaagtatggatatagtccacgtgtcaagaaaaattcagtacacgagcaagaagccattaactctgacccagagttgtctaattgtgaaaattttcagaagactgatgtgaaagatgatctgtctgatcctcctgttgcaagcagttgtatttctgagaagtctccacgtagtccacaactttcagattttggacttgagcggtacatcgtatcccaagttctaccaaaccctccacaggcagtgaacaactataaggaagagcccgtaattgtaaccccacctaccaaacaatcactagtaaaagtactaaaaactccaaaatgtgcactaaaaatggatgattttgagtgtgtaactcctaaattagaacactttggtatctctgaatatactatgtgtttaaatgaagattacacaatgggacttaaaaatgcgaggaataataaaagtgaggaggccatagatgcagaatccaggctcaatgataatgtttttgccactcccagccccatcatccagcagttggaaaaaagtgatgccgaatataccaactctcctttggtacctacattctgtactcctggtttgaaaattccatctacaaagaacagcatagctttggtatccacaaattacccattatcaaaaacaaatagttcatcaaatgatttggaagttgaagatcgtacttcgttggttttaaattcagacacatgctttgagaatttaacagatccctcttcacctacgatttcttcttatgagaatctgctcagaacacctacacctccagaagtaactaaaattccagaagatattctccagcttttatcaaaatacaactcaaacctagctactccaatagcaattaaagcagtgccacccagtaaaaggttccttaaacatggacagaacatccgagatgtcagcaacaaagaaaactgaaattccagtggatctatccaacacagaaactgaacaaaatgagatgaaagccgagctggaccgattttaacattcacattgccctgcctctgtccccctttaaacgttgacccattttaaagacaaacatgaacattaacatcataatatgctttttatgaagtttcaataaggtttaaccttagtcttgttgacatgtagcccagtcattcactctttaaggattattagtgtttcattgatactaaattacccagcttaatcaacagaatggtttaagtagtaccaggaagtaggacaagtaatttcaaaaatataaaggtgtttgctactcagatgaggctgcccctgaccttctggccagagagacattgctgccagccagctctgccttcccatcatctcctttcaggaccgtcccacaccttttacttgctcagtgctgtctgaagatgcagttgctgtttgcaaacaacaggaacaccagttaaactaattaggaaaagagggagatttccaggcctgggtaactatatactgtgaccattggaggtagagacaggtctcaacagttggaaccaggaactctgctgtcaggttgtgagttttgtttctcttccagcttttcactgtgtgggggtcttttctcttatgtcagctctttctatcacatggcagctgacctctcacgctccactctgcagcttggacacccagtagaccctgaatttcactctctctaaaaggttctgagggctcatcctgggccaggggccctcctgtgcactgttagctatggccacgggagcctccagagctgcctggtagcttcaggttgacctgcttatcaggcctacgatccttctgatttaagtacagctggaaagtattatctaattaagttcatgatagtgcttttggagaacttgtcaaattacagccaatgagaaaataaggacctagcataccgtggagaaccattaaaaatttgagaagaaacaacaagtattatgtcaacttacttcaaaggcgtagttttgggaatttgatgcagtaaagattaccctgttttatgattgttccttgaaagtcaaatgggggacctgtccattgtgctctattaatcttgtcagaaaactgtcaccaaaacaaaatttgagtttgtccttgttctaggagttactgggtagttgtaagtataatttttattaaatataatgtaaaataaaatgttaagatacttagttttgtttttcaaagtaaagctgtagtcagcgttatgtatgccattgactctgaaatgtataccagcctttcactgtgtaccgtgtgtatataaatccacagaaccggatgagctgcttagggagggaatatattcaaagtgtaccaaggaccaaatcctggagttctcccaactttagaggatggaaaggggcagagtaatctagcaaaggagactgaggccagtgaagtaggaagaaagtatttcaaggagagtgatgattctgtgaatattgctgagaattcaaataaaaagaggactgagaactgaaaaaaaaaaaaaaaaaaaa

SEQ ID NO: 2334 - protein, 330 aa, Homo sapien
MEKNSMDIMKIREYFQKYGYSPRVKKNSVHEQEAINSDPELSNCENFQKTDVKDDLSDPPVASSCISEKSPRSPQLSDFGLERYIVSQVLPNPPQAVNNYKEEPVIVTPPTKQSLVKVLKTPKCALKMDDFECVTPKLEHFGISEYTMCLNEDYTMGLKNARNNKSEEAIDAESRLNDNVFATPSPIIQQLEKSDAEYTNSPLVPTFCTPGLKIPSTKNSIALVSTNYPLSKTNSSSNDLEVEDRTSLVLNSDTCFENLTDPSSPTISSYENLLRTPTPPEVTKIPEDILQLLSKYNSNLATPIAIKAVPPSKRFLKHGQNIRDVSNKEN

SEQ ID NO: 2335 - DNA, 1158 bp, Homo sapien
ttaacccaaatgggttgggatggcacgaggggaaatgggaggggaagagaacagctgacatcttgaggaaagctttggggtagtggagaggtaagggggtcatggtcagtctgaactcaacaatagggctgaatgaatttaccaaaggaagctgccttatattatatgccaggctgctggggaaagcctcaggtcctggccagcccctgttctcacaagaacatgcaggttaccacataaataatggcatatgccttccataggacgtcaacctgacttaaatctacctataccctactctctattctttggtttttggttctcatccctgtggaaggaaatgggcctcttctggcatctcatgctactctgtgcttttccttgggctccaaattctagctcataaagatgcaagttttgcaatttcctataaatggttaagaaaagagcaagctgtccagagagtgagaagtttgaaaagagaggtgcataagagagaaatgatgtccatttgagccccaccacggaggttatgtggtcccaaaaggaatgatggccaagcaattaatttttcctcctagttcttagcttgcttctgcattgattggctttacacaactggcatttagtctgcattacacaaatagacactaatttatttggaacaagcagcaaaatgagaactttatttggtgcagtcagggctccatttagttccctcactctgcttctaatcaccccttctcccagccctcttctatttgatagaggtctgtccctcagatcagcaatgtcttagcccctctcctctcttccattccttcctgttggtactcatttcttctaacttttaataaacatttaggtataatacattacagtaagtgctatttagatacaaacttaaaacatactatatattttaaggatctaagaatcctttagagaaggcacatgactgaagtacctcagctgcgcagcctgtagccagtttttttaatgtaaaagtaagaatgccagccttaacctagccctgcagataaaagctaacttttattaataccagccctgaataatggcactaatccacactcttccttagagtgatgctggaaaaataaaatcaggggcttcaggattaaaaaaaaaaaaaaaaaa

SEQ ID NO: 2336 - protein, 40 aa, Homo sapien
MRTLFGAVRAPFSSLTLLLITPSPSPLLFDRGLSLRSAMS

SEQ ID NO: 2337 - DNA, 1743 bp, Homo sapien
gaaccccctttctcctggtaaagggtaaggggggggataatgtttaccacaggtacgaaatagtcactttaacattgagacctctgcctcattgaattcaggttttttaagtacttgaaactcttcagattctccttattttagtttctttttacatttatgaagtagaaagcattgttttgtaaactgttttgaaaataaatagcctagtctcttatcctctttagcgtggattaaaggtgaagttctgcaaatgggagagtgttcacagtagatagctcagattgattgaacacatttgaggaagagactcctgcatgagataccagcatttttacaaatactttttatgtacattctttattttgtcattttgtcaaccctctccccaagcacatcttctttccttttactatgtctatgtagggaaaaacaaaacaaaaaattgcacttacgttacactcccaaaatgtgggtaatccgtgtctttcaaaaaacatttctgttttttgttttgttttggtcagtccattgcataagtgacaagtttgggtgcttgtggcacgtatgtatgaagcgggagggggatgasaattgcctgtccttcagtargctgtaaaagtaatttacatgtaagtaaaaagggaaaatagaatagatgccaaagtcatttattcagtccttagttttcttatgtggcattactgcatctgctagttagtgagaaagcaccctcagcttttactgctcccctccctgcctgccaacacacttgatgtgtgcaaacagccctcaagtatctgtcagatgacctatataaggtattgaataaggtattcttgtcagtttagaaatggactggataaaacttacttggttgtcattattttatctcatttgtcctgttacatgccctatgttaagataattatattgccactaataatcaagatgctaaatgagtattacaactggctaatatcattttttatatacaagggtatgtgtatatttggaattgrtatgagaaactcatttgtacccatttgagtgatattgcacaacaaacacagatayctacagactccgttttcattttctcgtgttctttatgataatgatctttgtagattggttatttctgtactttatctgtaataaactttgtagatcctgtgaaccattactttgcctaaatcacttgagacttgagtctttaataacaaagcatcaatattcactaaagtcaatctcttttgagtttctgtgacttggctagaagctcttgacactaagggattagtgttaattttccctgggggtgttccactagggcattactgtataatgacttgatgttgccacatagacttcaagatatataatattttgaggattttgttgattggcctatgttttattgcatagtgtgaaacgtgtaaagcttggttaacctgtatatagatagcttattgttgactagttatagtgtatttagggttgcctgtaatatttaagcttctttactgatgtgtgtgctggtaggaacatataatttttgtacattatatttactgagatgttgccttttttattttacaaatactttggaattccaatgtgttttttgcttccgtgaggattaatttggaaaggtttttaatgacattccactgatttcagattttgcttgagattgacttcaataaattgtcctgtatgttccaaaaaaaaattaaaaaa

SEQ ID NO: 2338 - protein, 49 aa, Homo sapien
  unsure 41, 48: unknown amino acid
MWVIRVFQKTFLFFVLFWSVHCISDKFGCLWHVCMKREGDXNCLSFSXL

SEQ ID NO: 2339 - DNA, 5029 bp, Homo sapien
ataaaaacctactgaccaaggttcgagatgctgccctgtggttggagaccttgtcagacagcagacctgccaaggcttccctctccaccacctcctccattgctgatttcttccttgccttaaccatctgcaactctgtcatggtgtccacaaccaccgagcccaggcagagggtcaccatcaaaccctcaagcaaggctctggggacgtccctggagaagattcagcagctcttccagaagttgaagctattgagcctcagccagtcattctcatccactgcaccctctgacacagacctcggggagagcttaggggccaacgtggccaccacagactcggatgagagagatgatgcatctgtgtgcagtggaggtgactccactgatgacggtggctacaggagcagcatgtgggaccagggcgacatcctggagtctgggtcaggcacttccttggaggaggcattggaggccccagccacagacctggccaggcctgagttctgttacgaggctgagagccctgatgaggccgccctggtgcacgctgcccatgcctacagcttcacactagtgtcccggacacctgagcaggtgactgtgcgcctgccccagggcacctgcctcaccttcagcctcctctgcaccctgggctttgactctgtcaggaagagaatgtctgtggttgtgaggcacccactgactggcgagattgttgtctacaccaagggtgctgactcggtcatcatggacctgctggaagacccagcctgcgtacctgacattaatatggaaaagaagctgagaaaaatccgagcccggacccaaaagcatctagacttgtatgcaagagatggcctgcgcacactatgcattgccaagaaggttgtaagcgaagaggacttccggagatgggccagtttccggcgtgaggctgaggcatccctcgacaaccgagatgagcttctcatggaaactgcacagcatctggagaatcaactcaccttacttggagccactgggatcgaagaccggctgcaggaaggagttccagatacgattgccactctgcgggaggctgggatccagctctgggtcctgactggagataagcaggagacagcggtcaacattgcccattcctgcagactgttaaatcagaccgacactgtttataccatcaatacagagaatcaggagacctgtgaatccatcctcaattgtgcattggaagagctaaagcaatttcgtgaactacagaagccagaccgcaagctctttggattccgcttaccttccaagacaccatccatcacctcagaagctgtggttccagaagctggattggtcatcgatgggaagacattgaatgccatcttccagggaaagctagagaagaagtttctggaattgacccagtattgtcggtccgtcctgtgctgccgctccacgccactccagaagagtatgatagtcaagctggtgcgagacaagttgcgcgtcatgaccctttccataggtgatggagcaaatgatgtaagcatgattcaagctgctgatattggaattggaatatctggacaggaaggcatgcaggctgtcatgtccagcgactttgccatcacccgctttaagcatctcaagaagttgctgctcgtgcatggccactggtgttactcgcgcctggccaggatggtggtgtactacctctacaagaacgtgtgctacgtcaacctgctcttctggtatcagttcttctgtggtttctccagctccaccatgattgattactggcagatgatattcttcaatctcttctttacctccttgcctcctcttgtctttggagtccttgacaaagacatctctgcagaaacactcctggcattgcctgagctatacaagagtggccagaactctgagtgctataacctgtcgactttctggatttctatggtggatgcattctaccagagcctcatctgtttctttatcccttacctggcctataagggctctgatatagatgtctttacctttgggacaccaatcaacaccatctccctcaccacaatccttttgcaccaggcaatggaaatgaagacatggaccattttccacggagtcgtgctcctcggcagcttcctgatgtactttctggtatccctcctgtacaatgccacctgcgtcatctgcaacagccccaccaatccctattgggtgatggaaggccagctctcaaaccccactttctacctcgtctgctttctcacaccagttgttgctcttctcccaagatactttttcctgtctctgcaaggaacttgtgggaagtctctaatctcaaaagctcagaaaattgacaaactccccccagacaaaagaaacctggaaatccagagttggagaagcagacagaggcctgcccctgtccccgaagtggctcgaccaactcaccacccagtgtcatctatcacaggacaggacttcagtgccagcaccccaaagagctctaaccctcccaagaggaagcatgtggaagagtcagtactccacgaacagagatgtggcacggagtgcatgagggatgactcatgctcaggggactcctcagctcaactctcatccggggagcacctgctgggacctaacaggataatggcctactcaagaggacagactgatatgtgccggtgctcaaagaggagcagccatcgccgatcccagagttcactgaccatatgaggagctgcagaaatctgtacaaactcaacagaggccacctagtcactggtccacataacccttgaccccttcttcttcatagaggaaacaatgtgccagtcttattcttttcttcaacaaccttgacttccatggaggaagtgctggccccaaggggtctgacacaaagacgggaaacccagtcggcctctagttttctgctgctctcaggcagcacatcttgcaaacagtttggagaaggaggctgtttttgttgaatcgagttctcaaatcggtttagaccaaagccattcttctgaccctctagataagcgtagcctacaacccagtgccgtaagtttccaagattcaagaagtgtatcaacccaggcaatatctcaggatatggaagtttctgggtttatttacccctcagtgcccagagttaaagtttcagaagagacttgtgcacataagggcttcatctcaagtgtattgcagtaatggctgaatcggggttaacatcccttccaggcacagcgagttggttctgctttttgcctgtaagccaaagaaaagccacatctaaaaagctactactaaaagccagaaagaaaagtggatttgaactcagtgtcacagactcttctgagtgttttagggtcacagctagtgtaagaggcatgaagaatagacatgcaaaagggaacgggtgcaccagagacccctgttttggctgacagaccatatgtcccaccagctggggaatctgacaagaggacataggtggcactctttttttaaagctatttattgtatctatttttaaataaaattgcccatcctcattcagctcttagaacaaaagcaaaaaaccctgtaaatcaggagatataagcacatctgcacccagaataggcccatatgatagggcaaccctgagcttaaacaatgacatcttcaagggtagaactaatctgaaacccccttccagcctctggaagacactggcctgcatcagttagagtcagagcaagtgtcacttcacagggaaaagaaggattatatagacttcctatccctagagtttataaatgtcaactatataaaaaaagctcaaaacagtgttaaaggaatgaacagtagaattttaataggctgtccaaagaagccaggtctgctgtgggcaagtatagcctaaccctagtcttgtaaaataagccagaaagggttactgagccaccttaagctagtacctatatagtaggcaaaaagtacagaaatagatgcaataagtgtggtgagtctttgagcctacgagtcatgccaccagccataagttgacctatcacttgagaacctcctcagcaaagatgccagaaaacattcaatcaagttggcaaatgacacagggagctggccctctgaccatcttcctggcaaacctggactggaagggccatttgcagcactgtcctggagctaatacactgtttcactgcctctgccatataatgatgccagcactagccagctggtgggtatttggaggaatcctgcatgaggattgcccaataaggggcaggtacacatacctggcaaagtgatgatgatgtgaattgtttccagtgaggggattgagtcaaaacttggatctcaggtacctcaatttttcccccaatttctggctactactaaaagccagaaagaacagaacagtggcctcaggagatctgagtttgaatccttgctctctaggatgcaggtggcttgaagcagaatgccacacctgcaagttgattagaactgcctttcttcccaggcttgacataggtattaagtcaaaattacatgaaacccagtggtaaaaaagcctctgaaagctgtaacaccctcagtaataacaaaagggatttttatttcacagctaaagggaaaataggtggagaagttaaaaaataatgtctgatcctgttcctaagttccaaactatagccaacactctgatgctgctctttttcttgtaggaccaaccgtcccagtttgcctgggactttctcatttttacagagtcccaaatcctaggaaactggagcaactggtacaactggtcacctactcttgcccctctgtaaatcaagccaactgtgaccatccaatgtgccatcttacagggaaaagttataaccactattcccctataacataatgctaatgattgtacttagtacatttttatacttttatgatattttactgattggaaatgtcatcctttattaaaaataaacatggttttccat

SEQ ID NO: 2340 - protein, 914 aa, Homo sapien
KNLLTKVRDAALWLETLSDSRPAKASLSTTSSIADFFLALTICNSVMVSTTTEPRQRVTIKPSSKALGTSLEKIQQLFQKLKLLSLSQSFSSTAPSDTDLGESLGANVATTDSDERDDASVCSGGDSTDDGGYRSSMWDQGDILESGSGTSLEEALEAPATDLARPEFCYEAESPDEAALVHAAHAYSFTLVSRTPEQVTVRLPQGTCLTFSLLCTLGFDSVRKRMSVVVRHPLTGEIVVYTKGADSVIMDLLEDPACVPDINMEKKLRKIRARTQKHLDLYARDGLRTLCIAKKVVSEEDFRRWASFRREAEASLDNRDELLMETAQHLENQLTLLGATGIEDRLQEGVPDTIATLREAGIQLWVLTGDKQETAVNIAHSCRLLNQTDTVYTINTENQETCESILNCALEELKQFRELQKPDRKLFGFRLPSKTPSITSEAVVPEAGLVIDGKTLNAIFQGKLEKKFLELTQYCRSVLCCRSTPLQKSMIVKLVRDKLRVMTLSIGDGANDVSMIQAADIGIGISGQEGMQAVMSSDFAITRFKHLKKLLLVHGHWCYSRLARMVVYYLYKNVCYVNLLFWYQFFCGFSSSTMIDYWQMIFFNLFFTSLPPLVFGVLDKDISAETLLALPELYKSGQNSECYNLSTFWISMVDAFYQSLICFFIPYLAYKGSDIDVFTFGTPINTISLTTILLHQAMEMKTWTIFHGVVLLGSFLMYFLVSLLYNATCVICNSPTNPYWVMEGQLSNPTFYLVCFLTPVVALLPRYFFLSLQGTCGKSLISKAQKIDKLPPDKRNLEIQSWRSRQRPAPVPEVARPTHHPVSSITGQDFSASTPKSSNPPKRKHVEESVLHEQRCGTECMRDDSCSGDSSAQLSSGEHLLGPNRIMAYSRGQTDMCRCSKRSSHRRSQSSLTI

SEQ ID NO: 2341 - DNA, 7267 bp, Homo sapien
ctgctccttgcaccccgctccctgcctggacacaggctcactcgctgccttcttctgggggaaaccagcttcttgccagccacagctgctgcctccgccactggccaccgcccctgtcctgggagtcccttggcccagacacccacctgacttagtggctcctctgcaggaaaggtggctgccccctgcgttcctccatccaaccatgagctggtgcccatcaccactgagaatgcaccaaagaatgtagtggacaagggagaaggagcctcccggggtggaaacacacggaaaagcctcgaggacaacggctccaccagggtcaccccgagtgtccagccccacctccagcccatcagaaacatgagtgtgagccggaccatggaggacagctgtgagctggacctggtgtacgtcacagagaggatcatcgctgtctccttccccagcacagccaatgaggagaacttccggagcaacctccgtgaggtggcgcagatgctcaagtccaaacatggaggcaactacctgctgttcaacctctctgagcggagacctgacatcacgaagctccatgccaaggtactggaatttggctggcccgacctccacaccccagccctggagaagatctgcagcatctgtaaggccatggacacatggctcaatgcagaccctcacaatgtcgttgttctacacaacaagggaaaccgaggcaggataggagttgtcatcgcggcttacatgcactacagcaacatttctgccagtgcggaccaggctctggaccggtttgcaatgaagcggttctatgaggataagattgtgcccattggccagccatcccaaagaaggtacgtgcattacttcagtggcctgctctccggctccatcaaaatgaacaacaagcccttgtttctgcaccacgtgatcatgcacggcatccccaactttgagtctaaaggaggatgtcggccatttctccgcatctaccaggccatgcaacctgtgtacacatctggcatctacaacatcccaggagacagccagactagcgtctgcatcaccatcgagccaggactgctcttgaagggagacatcttgctgaagtgctaccacaagaagttccgaagcccagcccgagacgtcatcttccgtgtgcagttccacacctgtgccatccatgacctgggggttgtctttgggaaggaggaccttgatgatgctttcaaagatgatcgatttccagagtatggcaaagtggagtttgtattttcttatgggccagagaaaattcaaggcatggagcacctggagaacgggccgagcgtgtctgtggactataacacctctgaccccctcatccgctgggactcctacgacaacttcagtgggcatcgagatgacggcatggaggaggtggtgggacacacgcaggggccactagatgggagcctgtatgctaaggtgaagaagaaagactccctgcacggcagcaccggggctgttaatgccacacgtcctacactgtcggccacccccaaccacgtggaacacacgctttctgtgagcagcgactcgggcaactccacagcctccaccaagaccgacaagaccgacgagcctgtccccggggcctccagtgccactgctgccttgagtccccaggagaagcgggagctggaccgcctgctgagtggctttggcttagagcgagagaagcaaggcgccatgtaccacacccagcacctcaggtcccgcccagcagggggctcggctgtgccctcctctggacgccacgttgtcccagcccaggttcatgtcaatggtggggcgttagcatctgagcgggagacagacatcctggacgatgaattgccaaaccaggatggtcacagtgcgggcagcatgggcacactctcttctctggacggggtcaccaacaccagtgaggggggctacccagaggccctgtccccactgaccaacggtctggacaagtcctaccccatggagcctatggtcaatggaggaggctacccctacgagtctgccagccgggcggggcctgcccatgctggccacacggcccccatgcggccctcctactctgcacaggagggtttagctggctaccagagggaggggccccacccagcctggccacagccagtgaccacctcccactatgcccatgaccccagcggtatgttccgctctcaatccttttcggaagctgaaccccagctgcccccagctccggtccgagggggaagcagccgggaggctgtgcaaaggggactgaattcatggcagcagcagcagcagcagcagcagcagcctcgcccacctccacgccagcaggaaagagcccacttggagagtcttgtagccagcaggcccagccctcagccattggcagagacccccatccccagtctccctgagttcccgcgagcagcctcccagcaggagattgaacagtccatcgaaacactcaatatgctgatgctggacctggagccagcctccgctgctgccccactacacaagtcccagagtgtccccggggcctggccaggggcttctccactctcctcccagcccctctctggatcctcccgtcagtcccatccactgacccagtccagatctggctatatccccagtgggcattcgttgggaacccctgagccagccccacgggcctctctggagtctgtccctcctggcaggtcttactcaccttatgactatcagccatgtttggctgggcctaaccaggatttccattcaaagagcccagcctcttcctccttgcctgccttccttccgaccacccacagccctccagggcctcagcaacccccagcctctctccctggcctcactgctcagcctctgctctcaccaaaggaagcgacttcagacccctcccggactccagaggaggagccattgaatttagaagggctggtggcccacagggtagcaggggtacaggctcgggagaagcagcctgcagagcccccagcccctctgcggaggcgggcggccagtgatggacagtatgagaaccagtctccagaagccacatcccctcgtagccctggggttcgctcccctgtccagtgtgtctccccggagctggctcttaccatcgctctcaatcctggagggcggcccaaagagccccatttgcacagctacaaggaggccttcgaggagatggagggaacctccccgagcagcccaccacccagtggggtgcggtcccccccgggtctggccaagacacccctgtctgctctgggcctgaaacctcacaacccagcggacatcctgttgcaccccacaggagttaccagaagacggatccagccagaggaagatgaggggaaggtggtggtcaggctgtcagaagagccccggagctatgtggagtctgtggcacggacagcggtggctggaccccgagctcaggactctgagcccaagagctttagtgctccagccacccaggcctatggccatgagatacccctgaggaacgggaccctgggtggctcctttgtctcccccagccccctctccaccagcagccccatcctcagtgctgacagcacttcagtggggagtttcccgtcgggagagagcagtgaccagggtccccggacgcccacccagcctctgttggagtctggcttccgctcaggcagcctgggacagcccagcccgtctgcccagagaaactaccagagctcttctcctctcccgactgtgggcagtagctacagcagccccgactactcacttcagcatttcagctcctctccggaaagccaggctcgagctcagttcagtgtggctggcgtccacacggtgcctgggagccctcaggcgcgccacagaacagtgggcaccaacactccccctagtcctggcttcggctggcgggccatcaatcccagcatggctgcccccagcagtcccagtttgagccatcaccagatgatgggtccaccaggcactggcttccatggtagcactgtctccagcccccagagcagtgcagcgaccaccccggggagccccagcctgtgtcggcacccagcaggggtctaccaggtttctggcctccacaacaaagtggccaccaccccggggagtcccagcctgggccggcaccctggggctcaccaaggcaacctggcctccggtcttcatagcaatgcaatagccagccctggaagccccagcctgggccgtcacctcggagggtctggatctgtggttcccggcagcccctgcttggaccggcatgtggcctatggcggctattctaccccggaggatcggagacccacactgtcccggcagagcagtgcctctggctaccaggctccttccacgccctccttccctgtctcccctgcctactaccctggcctgagcagccctgccacctccccgtcaccagactccgcagccttccggcaagggagcccaacaccagccttgccagagaagcgaaggatgtcagtgggagaccgggcaggcagcctccccaactatgccaccatcaatgggaaggtgtcttcgcctgtcgccagcggcatgtccagtcccagcgggggcagcaccgtctccttctcccacactctgcccgacttctccaagtactccatgccagacaacagcccggagacgcgggctaaagtgaagtttgtccaggacacttctaagtattggtacaagcctgagatctccagggagcaggccatcgcgctcctcaaggaccaggagccgggggccttcatcatccgcgacagtcactccttccgaggcgcgtacgggctggccatgaaggtgtcttcgccacctccaaccatcatgcagcagaataaaaaaggagacatgacccatgagctggtcaggcattttctgatagagactggccccagaggagtcaagctcaagggctgccccaatgagccaaacttcggatcgctgtctgccctggtctaccagcactccatcatcccattggccctgccttgcaagctggtcattccaaaccgagaccccacagatgaatcgaaagatagctccggccctgccaactcaactgcagacctgctgaaacaaggggcagcctgcaatgtgctcttcatcaactctgtggacatggagtcactcactgggccacaggccatctctaaagccacatctgagacgttggctgcagaccccacgccagctgccaccatcgttcacttcaaagtctctgcccagggaatcactctgactgacaaccagagaaagctctttttcagacgccactaccctctcaacactgtcaccttctgtgacctggatccacaggaaagaaagtggatgaaaacagagggtggtgcccctgctaagctcttcggcttcgtggcccggaagcagggcagcaccacggacaacgcctgccacctctttgctgagcttgaccccaaccagccggcctctgccatcgtcaacttcgtctccaaggtcatgctgaatgccggccaaaagagatgaaccctgccccttgcccagggccagtgccatggggaaggggcttgtggggaggggacccatgaatcctgaccactcttgaacccagaaggaggactttgggccaatttcggaggagagaagaaagtgcaacgtggggagagggaagtgaattgcagaggggagggggaaaagagagagagagagagagagagagagagagagagagagaaagatggaggagaagaacttggattcccctgggtagatggaaactgcaaaaacccaaagcctccaaaactaaccaggtccacctaacaccccctccctcccctaagaagatggatgtcctcaaaagagaaggaacaaacctccttgggaatccacattttttgggggaatggaaaagctctgtctccctaactcaactgctttgcaaggggaaatcaagctgggagaatctttttctggccacctgtagggtaggttgtcaaaccaaacagagccaccgtgggacatcaagtggaagaacttgtttgcttgaaagtatctcagacccaaggcacctcaggtctctttgctgtgcctccactatattgtcgtgtgggtgtgtgtctgcacccacatcctcacacattgatctagatctgcctttatccactcgaattataaacagctcggcttgtccttgtcccatgtgtttgtagacacacatgcatactgtccaaagattagggttggtggtggcagtgcagcaggggagggacaaacaaccaagctatgggtgacagaggctctctcctggtgcctgcacctgcactctagtgaccctgggtgccgccagacccttctcttctacaaagaccccagcaggagtgggagggtctgcaatggcatcgccctgtcctgccttggccagaagcctggagctttggtttgaggaggtagagatatgtgtatccataggaagagatctgtcagaacaggcagctgttgagctcggggtgtcttccccaaggcatgtggctcagcagcaagaaaggcaagttgctcctgctggggccctggactctgccttagctcccacctctcagccttgttattgggtttcatgcccctggaccagccttatctcagacctgcttacctgcatgatgcctttttgggggctggggattgagtcttgctgctctgcccagccctgttctattctgcagggtccctgtgttggaattctccctggggaacctactttctgctcagtgaggctccggccagaaacctggagtccttatcctcccctctgtaagtgttttagggtctggcttttgcaggcaccctctgacctcagcagagctcctgggcctgctgcctgcacaccacatcgcctacctacaatgccaaagcctcactgtcaccctttctgccttggtttccctagctgagccacgctgcccatgcagcagagggcagaaggcttgcacttgggccaaagggcctaaggtccactggacagttgggaaaacacctgaccaccatttaaggactctaagccagaatggaaaattcaccaggactccattcttaagcctatgcgagtcccctagagagaggcattgtactgatatataaatattatataatatatacatgagacatactgacagaatctgtaagctaataaaatgtaagaaaaggttaaaaaaagaaaaaaaaaaaa

SEQ ID NO: 2342 - protein, 1735 aa, Homo sapien
MSVSRTMEDSCELDLVYVTERIIAVSFPSTANEENFRSNLREVAQMLKSKHGGNYLLFNLSERRPDITKLHAKVLEFGWPDLHTPALEKICSICKAMDTWLNADPHNVVVLHNKGNRGRIGVVIAAYMHYSNISASADQALDRFAMKRFYEDKIVPIGQPSQRRYVHYFSGLLSGSIKMNNKPLFLHHVIMHGIPNFESKGGCRPFLRIYQAMQPVYTSGIYNIPGDSQTSVCITIEPGLLLKGDILLKCYHKKFRSPARDVIFRVQFHTCAIHDLGVVFGKEDLDDAFKDDRFPEYGKVEFVFSYGPEKIQGMEHLENGPSVSVDYNTSDPLIRWDSYDNFSGHRDDGMEEVVGHTQGPLDGSLYAKVKKKDSLHGSTGAVNATRPTLSATPNHVEHTLSVSSDSGNSTASTKTDKTDEPVPGASSATAALSPQEKRELDRLLSGFGLEREKQGAMYHTQHLRSRPAGGSAVPSSGRHVVPAQVHVNGGALASERETDILDDELPNQDGHSAGSMGTLSSLDGVTNTSEGGYPEALSPLTNGLDKSYPMEPMVNGGGYPYESASRAGPAHAGHTAPMRPSYSAQEGLAGYQREGPHPAWPQPVTTSHYAHDPSGMFRSQSFSEAEPQLPPAPVRGGSSREAVQRGLNSWQQQQQQQQQPRPPPRQQERAHLESLVASRPSPQPLAETPIPSLPEFPRAASQQEIEQSIETLNMLMLDLEPASAAAPLHKSQSVPGAWPGASPLSSQPLSGSSRQSHPLTQSRSGYIPSGHSLGTPEPAPRASLESVPPGRSYSPYDYQPCLAGPNQDFHSKSPASSSLPAFLPTTHSPPGPQQPPASLPGLTAQPLLSPKEATSDPSRTPEEEPLNLEGLVAHRVAGVQAREKQPAEPPAPLRRRAASDGQYENQSPEATSPRSPGVRSPVQCVSPELALTIALNPGGRPKEPHLHSYKEAFEEMEGTSPSSPPPSGVRSPPGLAKTPLSALGLKPHNPADILLHPTGVTRRRIQPEEDEGKVVVRLSEEPRSYVESVARTAVAGPRAQDSEPKSFSAPATQAYGHEIPLRNGTLGGSFVSPSPLSTSSPILSADSTSVGSFPSGESSDQGPRTPTQPLLESGFRSGSLGQPSPSAQRNYQSSSPLPTVGSSYSSPDYSLQHFSSSPESQARAQFSVAGVHTVPGSPQARHRTVGTNTPPSPGFGWRAINPSMAAPSSPSLSHHQMMGPPGTGFHGSTVSSPQSSAATTPGSPSLCRHPAGVYQVSGLHNKVATTPGSPSLGRHPGAHQGNLASGLHSNAIASPGSPSLGRHLGGSGSVVPGSPCLDRHVAYGGYSTPEDRRPTLSRQSSASGYQAPSTPSFPVSPAYYPGLSSPATSPSPDSAAFRQGSPTPALPEKRRMSVGDRAGSLPNYATINGKVSSPVASGMSSPSGGSTVSFSHTLPDFSKYSMPDNSPETRAKVKFVQDTSKYWYKPEISREQAIALLKDQEPGAFIIRDSHSFRGAYGLAMKVSSPPPTIMQQNKKGDMTHELVRHFLIETGPRGVKLKGCPNEPNFGSLSALVYQHSIIPLALPCKLVIPNRDPTDESKDSSGPANSTADLLKQGAACNVLFINSVDMESLTGPQAISKATSETLAADPTPAATIVHFKVSAQGITLTDNQRKLFFRRHYPLNTVTFCDLDPQERKWMKTEGGAPAKLFGFVARKQGSTTDNACHLFAELDPNQPASAIVNFVSKVMLNAGQKR

SEQ ID NO: 2343 - DNA, 2894 bp, Homo sapien
agcactttcattggacgagccaatcatttcttcactgtaactgaccccaggaacattctgttaaccaacgaacaactcgagagtgcgagaaaaatagtacatgattacaggcaaggaattgttcctcctggtcttacagaaaatgaattgtggagagcaaagtacatctatgattcagcttttcatcctgacactggtgagaagatgattttgataggaagaatgtcagcccaggttcccatgaacatgaccatcacaggttgtatgatgacgttttacaggactacgccggctgtgctgttctggcagtggattaaccagtccttcaatgccgtcgtcaattacaccaacagaagtggagacgcacccctcactgtcaatgagttgggaacagcttacgtttctgcaacaactggtgccgtagcaacagctctaggactcaatgcattgaccaagcatgtctcaccactgataggacgttttgttccctttgctgccgtagctgctgctaattgcattaatattccattaatgaggcaaagggaactcaaagttggcattcccgtcacggatgagaatgggaaccgcttgggggagtcggcgaacgctgcgaaacaagccatcacgcaagttgtcgtgtccaggattctcatggcagcccctggcatggccatccctccattcattatgaacactttggaaaagaaagcctttttgaagaggttcccatggatgagtgcacccattcaagttgggttagttggcttctgtttggtgtttgctacacccctgtgttgtgccctgtttcctcagaaaagttccatgtctgtgacaagcttggaggccgagttgcaagctaagatccaagagagccatcctgaattgcgacgcgtgtacttcaataagggattgtaaagcagggaggaaacctctgcagctcattctgccactgcaaagctggtgtagccatgctggtgagaaaaatcctgttcaacctgggttctcccagttacggaaaccttttaaagatccacattagccttttagaataaagctgctactttaacagagcacctggcgtgggccaagtgcctgatactcccttacactgaatcatgttatgatttatagaaatacctttcctgtagcttttatagtcattgtttttcaaagacgatataccagccctcacccaggttttaaaaaagcactggtaggcatagaataggtgctcagtatatggtcagtaaatgttctattgattatcaatcagtgaaaaaagaaatctgtttaaaatactgaattttcatctcactcccattgcaaatcaaggagatctcagcagtgaactgggaaaatacaaaagctctgggctaatctataaaaacttaccctgaaatattaagggcagtttgcttctagtttggggattgcgctagcccaatgaaggtgatgaagcttttggatttggagggtaaaagctccttcacaccccttccaaaagtcagtcacagaccactgcaacatgccttccctgctggatcattatatacattcagattgtgagtggattgccttggttgacttttaatttattgttttttgttcttataaagatgataatcttaccttgcagttattgactttatattcaattatttacatcaaataatgaaataactgaaatgtacaaatgtcaaattttggaagtatattcaataccaatgctgtatgagtgggctgaatccagttcattgttttttttttggtaagaagtgagactacagttccagctacctacatgtcttttcttgtcatccttatagatctctttggctttcagaaagatacagtgataatgtgtgtatgaatcagtcacaatgaattttacttgaatattgtatgttgcattccacttcatttgaaaataatgaaaccatgtaccactgtttacatcatctgtagtgatttcatagataatatatttaatatgacagattatgtttcaactctgtagatgtttaacgtcatagacagttggccctctgtatccgtgagctctatatctgtgaattcaaccaagtttggatggaaaattttttttttttttttttttttgagacggagtctcgctctgtcacccaggctggagtgcagtggcgtagtctcggctcactgcaagctccgcctcctgggttcacgccgttctcctgcctcagcctctctgagaagctgggactacaggcgcccgccaccacgcccggctaatttttttgtatttttagtagagacggggtttcactgtggtctcgatctcctgacctcgtgatccgcccgccttggcctcccaaggtgctgggattacaagcgtgagccaccgcacccggcctgaaaatattttctaaaaagataaaaaatatacataacgatgaaaaataatacaaatttaaaaaccaatacagtataacaactatttacatagtgcttacattgtattaggtgttataagcaatctagagatgatttagcaagtatacaggaggatgtgcctaggttatatgcaaatactgtgccattttatatcaggaacttgagcatctgcagatattggtatcggagggcggtcctggaaccaagcatccacggatactgaggggtgacatttcatgaagtgtagatcattgtattcagagattgtaaatgaaaaaaatatagaaactatttagttttggtagattttttttctgacaatgtgaccagactgaatttcctcataaagaaaaaatggcgtgccttgtgtctgtgtttctcttttctctgaaaggattaatagatctgaagctttgggccacttagagccttaaaaaaaaaaaaaaaaaaaaaaaaaaaaaaaa

SEQ ID NO: 2344 - protein, 236 aa, Homo sapien
MILIGRMSAQVPMNMTITGCMMTFYRTTPAVLFWQWINQSFNAVVNYTNRSGDAPLTVNELGTAYVSATTGAVATALGLNALTKHVSPLIGRFVPFAAVAAANCINIPLMRQRELKVGIPVTDENGNRLGESANAAKQAITQVVVSRILMAAPGMAIPPFIMNTLEKKAFLKRFPWMSAPIQVGLVGFCLVFATPLCCALFPQKSSMSVTSLEAELQAKIQESHPELRRVYFNKGL

SEQ ID NO: 2345 - DNA, 517 bp, Homo sapien
  Unsure 208: Unknown base
ttttatgttttacaatttgtatggctgattctacgcacgtttaaatgtgtttatgacaattgtagatttcggttttcctctggttaaaccaatgtggaagtacacaggatgggagctgagagacaagcatcctgggcccagccatgctggcctcagtgggccaagctggggacagatgacctctgctccgtggatcctgctggctcanggtggggaaggggcctcaggagaggagtcaggctctcttctttattctcctcacagccatggtgaatggcattcctgggaggctggtttggagaactcgctgaaccatgctctgcatccagtctaggtggctcctagcggggcttggtgggttctccatcctcagcaccatctgcagcaccatcttggtcatctgagaagcagggttgcagaggacactgtggtctgggtggcagtctggtgccacatggcagaattcatcacagtagcaacttcccctcttgcagtggtgatccgtcccaagacagca

SEQ ID NO: 2346 - DNA, 1445 bp, Homo sapien
ggaaggctgcaggaccaggaccgaaaaaggactaggaggctgggatcagcaacaactggggaaggccaaggaagactgacctgaggggaaaggagaaactggggaggtgaggtctactactcaacaggatattcttcaaggaaaatgaaccccacactaggcctggccatttttctggctgttctcctcacggtgaaaggtcttctaaagccgagcttctcaccaaggaattataaagctttgagcgaggtccaaggatggaagcaaaggatggcagccaaggagcttgcaaggcagaacatggacttaggctttaagctgctcaagaagctggccttttacaaccctggcaggaacatcttcctatcccccttgagcatctctacagctttctccatgctgtgcctgggtgcccaggacagcaccctggacgagatcaagcaggggttcaacttcagaaagatgccagaaaaagatcttcatgagggcttccattacatcatccacgagctgacccagaagacccaggacctcaaactgagcattgggaacacgctgttcattgaccagaggctgcagccacagcgtaagtttttggaagatgccaagaacttttacagtgccgaaaccatccttaccaactttcagaatttggaaatggctcagaagcagatcaatgactttatcagtcaaaaaacccatgggaaaattaacaacctgatcgagaatatagaccccggcactgtgatgcttcttgcaaattatattttctttcgagccaggtggaaacatgagtttgatccaaatgtaactaaagaggaagatttctttctggagaaaaacagttcagtcaaggtgcccatgatgttccgtagtggcatataccaagttggctatgacgataagctctcttgcaccatcctggaaataccctaccagaaaaatatcacagccatcttcatccttcctgatgagggcaagctgaagcacttggagaagggattgcaggtggacactttctccagatggaaaacattactgtcacgcagggtcgtagacgtgtctgtacccagactccacatgacgggcaccttcgacctgaagaagactctctcctacataggtgtctccaaaatctttgaggaacatggtgatctcaccaagatcgcccctcatcgcagcctgaaagtgggcgaggctgtgcacaaggctgagctgaagatggatgagaggggtacggaaggggccgctggcaccggagcacagactctgcccatggagacaccactcgtcgtcaagatagacaaaccctatctgctgctgatttacagcgagaaaataccttccgtgctcttcctgggaaagattgttaaccctattggaaaataaaggagaattcctgcttgccacagaccccgaaaaaaaaaaaaaaaaagggcggccgc

SEQ ID NO: 2347 - protein, 414 aa, Homo sapien
MNPTLGLAIFLAVLLTVKGLLKPSFSPRNYKALSEVQGWKQRMAAKELARQNMDLGFKLLKKLAFYNPGRNIFLSPLSISTAFSMLCLGAQDSTLDEIKQGFNFRKMPEKDLHEGFHYIIHELTQKTQDLKLSIGNTLFIDQRLQPQRKFLEDAKNFYSAETILTNFQNLEMAQKQINDFISQKTHGKINNLIENIDPGTVMLLANYIFFRARWKHEFDPNVTKEEDFFLEKNSSVKVPMMFRSGIYQVGYDDKLSCTILEIPYQKNITAIFILPDEGKLKHLEKGLQVDTFSRWKTLLSRRVVDVSVPRLHMTGTFDLKKTLSYIGVSKIFEEHGDLTKIAPHRSLKVGEAVHKAELKMDERGTEGAAGTGAQTLPMETPLVVKIDKPYLLLIYSEKIPSVLFLGKIVNPIGK

SEQ ID NO: 2348 - DNA, 3278 bp, Homo sapien
gaagaattagatacttttgagtgggctttgaagagctggtctcagtgttccaaaccctgtggtggaggtttccagtacactaaatatggatgccgtaggaaaagtgataataaaatggtccatcgcagcttctgtgaggccaacaaaaagccgaaacctattagacgaatgtgcaatattcaagagtgtacacatccactctgggtagcagaagaatgggaacactgcaccaaaacctgtggaagttctggctatcagcttcgcactgtacgctgccttcagccactccttgatggcaccaaccgctctgtgcacagcaaatactgcatgggtgaccgtcccgagagccgccggccctgtaacagagtgccctgccctgcacagtggaaaacaggaccctggagtgagtgttcagtgacctgcggtgaaggaacggaggtgaggcaggtcctctgcagggctggggaccactgtgatggtgaaaagcctgagtcggtcagagcctgtcaactgcctccttgtaatgatgaaccatgtttgggagacaagtccatattctgtcaaatggaagtgttggcacgatactgctccataccaggttataacaagttatgttgtgagtcctgcagcaagcgcagtagcaccctgccaccaccataccttctagaagctgctgaaactcatgatgatgtcatctctaaccctagtgacctccctagatctctagtgatgcctacatctttggttccttatcattcagagacccctgcaaagaagatgtctttgagtagcatctcttcagtgggaggtccaaatgcatatgctgctttcaggccaaacagtaaacctgatggtgctaatttacgccagaggagtgctcagcaagcaggaagtaagactgtgagactggtcaccgtaccatcctccccacccaccaagagggtccacctcagttcagcttcacaaatggctgctgcttccttctttgcagccagtgattcaataggtgcttcttctcaggcaagaacctcaaagaaagatggaaagatcattgacaacagacgtccgacaagatcatccaccttagaaagatgagaaagtgaaccaaaaaggctagaaaccagaggaaaacctggacaacctctctcttcccatggtgcatatgcttgtttaaagtggaaatctctatagatcgtcagctcattttatctgtaattggaagaacagaaagtgctggctcactttctagttgctttcatcctccttttgttctgcattgactcatttaccagaattcattggaagaaatcaccaaagattattacaaaagaaaaatatgttgctaagattgtgttggtcgctctctgaagcagaaaagggactggaaccaattgtgcatatcagctgactttttgtttgttttagaaaagttacagtaaaaattaaaaagagataccaatggtttacactttaacaagaaattttggatatggaacaaagaattcttagacttgtattcctatttatctatattagaaatattgtatgagcaaatttgcagctgttgtgtaaatactgtatattgcaaaaatcagtattattttaagagatgtgttctcaaatgattgtttactatattacatttctggatgttctaggtgcctgtcgttgagtattgccttgtttgacattctataggttaattttcaaagcagagtattacaaaagagaagttagaattacagctactgacaatataaagggttttgttgaatcaacaatgtgatacgtaaattatagaaaaagaaaagaaacacaaaagctatagatatacagatatcagcttacctattgccttctatacttataatttaaaggattggtgtcttagtacacttgtggtcacagggatcaacgaatagtaaataatgaactcgtgcaagacaaaactgaaaccctctttccaggacctcagtaggcaccgttgaggtgtcctttgtttttgtgtgtgtgtgttcttttttaattttcgcattgttgacagatacaaacagttatactcaatgtactgtaataatcgcaaaggaaaaagttttgggataacttatttgtatgttggtagctgagaaaaatatcatcagtctagaattgatatttgagtatagtagagctttggggctttgaaggcaggttcaagaaagcatatgtcgatggttgagatatttattttccatatggttcatgttcaaatgttcacaaccacaatgcatctgactgcaataatgtgctaataatttatgtcagtagtcaccttgctcacagcaaagccagaaatgctctctccagggagtagatgtaaagtacttgtacatagaattcagaactgaagatatttattaaaagttgatttttttttcttgatagtatttttatgtactaaatatttacactaatatcaattacatattttggtaaactagagagacataattagagatgcatgctttgttctgtgcatagagacctttaagcaaactactacagccaactcaaaagctaaaactgaacaaatttgatgttatgcaaacatcttgcatttttagtagttgatattaagttgatgacttgtttcccttcaaggaaacattaaattgtatggactcagctagctgttcaatgaaattgtgaattagaaacatttttaaaagtttttgaaagagataagtgcatcatgaattacatgtacatgagaggagatagtgatatcagcataatgattttgaggtcagtacctgagctgtctaaaaatatattatacaaactaaaatgtagatgaattaacctctcaaagcacagaatgtgcaagaacttttgcattttaatcgttgtaaactaacagcttaaactattgactctatacctctaaagaattgctgctactttgtgcaagaactttgaaggtcaaattaggcaaattccagatagtaaaacaatccctaagccttaagtctttttttttttcctaaaaattcccatagaataaaattctctctagtttacttgtgtgtgcatacatctcatccacaggggaagataaagatggtcacacaaacagtttccataaagatgtacatattcattatacttctgacctttgggctttcttttctactaagctaaaaattcctttttatcaaagtgtacactactgatgctgtttgttgtactgagagcacgtaccaataaaaatgttaacaaaatataaaaaaaaaaaaaaa

SEQ ID NO: 2349 - DNA, 1186 bp, Homo sapien
  Unsure 54-55: Unknown base
ggcacgagccggcaagccgagctagggtgaaaactgggggcgcaccaggatgtnngacagaaaagcagaagatgagactctgttcattcacttttcctaggcccatcctgtggtcatctttccccctcccatcatacctcctccttcctggagcctctgccggcttggctgtaatggtggcacttacctggatatttcagtgggaggatgaaaggcgagactcaccctacgcggtgggacagatggggagaggaaaaaggcagagatggccaggagaggggtgcaggacaaaccagagaggttgggtcaggggaaaagggtggggagaaagaggggtgcaggccctgcaggccggttagccagcagctgcggcctccccgggcccttggcatccaacttcgcagacagggtaccagcctcctggtgtgtatcataggatttgttcacatagtgttatgcatgatcttcgtaaggttaagaagccgtggtggtgcaccatgacatccaacccgtatatataaagataaatatatatatatatgtatgtaaattatggcacgagaaattatagcactgagggccctgctgccctgctggaccaagcaaaactaagccttttggtttgggtattatgtttcgttttgttatttgtttgtttttgtggcttgtcttatgtcgtgatagcacaagtgccagtcggattgctctgtattacagaatagtgtttttaattcatcaatgttctagttaatgtctacctcagcacctcctcttagcctaattttaggaggttgcccaattttgtttcttcaattttactggttacttttttgtacaaatcaatctctttctctctttctctcctccccacctctcacccttgccctctccatctccctctcccgccctcccctcctccctctggctccccgtctcatttctgtccactccattctctctccctctctcctgcctcctgctgccccctccccagcccacttccccgagttgtgcttgccgctccttatctgttctagttccgaagcagtttcactcgaagttgtgcagtcctggttgcagctttccgcatctgccttcgtttcgtgtagattgacgcgtttctttgtaatttcagtgtttctgacaagatttaaaaaaaaaaaaaggaaaaaaaaaaaaaaaaaaa

SEQ ID NO: 2350 - protein, 145 aa, Homo sapien [sequence omitted]

SEQ ID NO: 2351 - DNA, 1608 bp, Homo sapien
cggacctgcctctcacgcaatggatcccctggcggcaacccgagaccggttctcctacccgcattccgccaagtctctcgctctgcccaggacgcacagatgagagcgctccgaagactgattcagggcaggatcctgctcctgaccatctgcgctgccggcattggtgggacttttcagtttggctataacctctctatcatcaatgccccgaccttgcacattcaggaattcaccaatgagacatggcaggcgcgtactggagagccactgcccgatcacctagtcctgcttatgtggtccctcatcgtgtctctgtatcccctgggaggcctctttggagcactgcttgcaggtcccttggccatcacgctgggaaggaagaagtccctcctggtgaataacatctttgtggtgtcagcagcaatcctgtttggattcagccgcaaagcaggctcctttgagatgatcatgctgggaagactgctcgtgggagtcaatgcaggtgtgagcatgaacatccagcccatgtacctgggggagagcgcccctaaggagctccgaggagctgtggccatgagctcagccatctttacggctctggggatcgtgatgggacaggtggtcggactcagggagctcctaggtggccctcaggcctggcccctgctgctggccagctgcctggtgcccggggcgctccagctcgcctccctgcctctgctccctgaaagcccgcgctacctcctcattgactgtggagacaccgaggcctgcctggcagcactacggcggctccggggctccggggacttggcaggggagctggaggagctggaggaggagcgcgctgcctgccagggctgccgtgcccggcgcccatgggagctgttccagcatcgggccctgaggagacaggtgacaagcctcgtggttctgggcagtgccatggagctctgcgggaatgactcggtgtacgcctacgcctcctccgtgttccggaaggcaggagtgccggaagcgaagatccagtacgcgatcatcgggactgggagctgcgagctgctcacggcggttgttagttgtgtggtaatcgagagggtgggtcggcgcgtgctgctcatcggtgggtacagcctgatgacctgctgggggagcatcttcactgtggccctgtgcctgcagagctccttcccctggacactctacctggccatggcctgcatctttgccttcatcctcagctttggcattggccctgccggagtgacggggatcctggccacagagctgtttgaccagatggccaggcctgctgcctgcatggtctgcggggcgctcatgtggatcatgctcatcctggtcggcctgggatttccctttatcatggaggccttgtcccacttcctctatgtccctttccttggtgtctgtgtctgtggggccatctacactggcctgttccttcctgagaccaaaggcaagaccttccaagagatctccaaggaattacacagactcaacttccccaggcgggcccagggccccacgtggaggagcctggaggttatccagtcaacagaactctagtcccaaaggggtggccag

SEQ ID NO: 2352 - protein, 496 aa, Homo sapien
MRALRRLIQGRILLLTICAAGIGGTFQFGYNLSIINAPTLHIQEFTNETWQARTGEPLPDHLVLLMWSLIVSLYPLGGLFGALLAGPLAITLGRKKSLLVNNIFVVSAAILFGFSRKAGSFEMIMLGRLLVGVNAGVSMNIQPMYLGESAPKELRGAVAMSSAIFTALGIVMGQVVGLRELLGGPQAWPLLLASCLVPGALQLASLPLLPESPRYLLIDCGDTEACLAALRRLRGSGDLAGELEELEEERAACQGCRARRPWELFQHRALRRQVTSLVVLGSAMELCGNDSVYAYASSVFRKAGVPEAKIQYAIIGTGSCELLTAVVSCVVIERVGRRVLLIGGYSLMTCWGSIFTVALCLQSSFPWTLYLAMACIFAFILSFGIGPAGVTGILATELFDQMARPAACMVCGALMWIMLILVGLGFPFIMEALSHFLYVPFLGVCVCGAIYTGLFLPETKGKTFQEISKELHRLNFPRRAQGPTWRSLEVIQSTEL

SEQ ID NO: 2353 - DNA, 3615 bp, Homo sapien
tgagttaatagggaaaggaagtttggtgatggaggggcagaaacacctgaactctaagaagaaaggactgaaagcctccttctctctctcactgaccttcacttcgagactggcccctgatccttccctggtgatctatgccatttttcccagtggaggtgttgtagctgacaaaattcagttctcagtcgagatgtgctttgacaatcaggtttcccttggcttctccccctcccagcagcttccaggagcagaagtggagctgcagctgcaggcagctcccggatccctgtgtgcgctccgggcggtggatgagagtgtcttactgcttaggccagacagagagctgagcaaccgctctgtctatgggatgtttccattctggtatggtcactacccctatcaagtggctgagtatgatcagtgtccagtgtctggcccatgggactttcctcagcccctcattgacccaatgccccaagggcattcgagccagcgttccattatctggaggccctcgttctctgaaggcacggaccttttcagctttttccgggacgtgggcctgaaaatactgtccaatgccaaaatcaagaagccagtagattgcagtcacagatctccagaatacagcactgctatgggtgcaggcggtggtcatccagaggcttttgagtcatcaactcctttacatcaagcagaggattctcaggtccgccagtacttcccagagacctggctctgggatctgtttcctattggtaactcggggaaggaggcggtccacgtcacagttcctgacgccatcaccgagtggaaggcgatgagtttctgcacttcccagtcaagaggcttcgggctttcacccactgttggactaactgctttcaagccattctttgttgacctgactctcccttactcagtagtccgtggggaatcctttcgtcttactgccaccatcttcaattacctaaaggattgcatcagggttcagactgacctggctaaatcgcatgagtaccagctagaatcatgggcagattctcagacctccagttgtctctgtgctgatgaagcaaaaacccaccactggaacatcacagctgtcaaattgggtcacattaactttactattagtacaaagattctggacagcaatgaaccatgtgggggccagaaggggtttgttccccaaaagggccgaagtgacacgctcatcaagccagttctcgtcaaacctgagggagtcctggtggagaagacacacagctcattgctgtgcccaaaaggaaaggtggcatctgaatctgtctccctggagctcccagtggacattgttcctgactcgaccaaggcttatgttacggttctgggagacattatgggcacagccctgcagaacctggatggtctggtgcagatgcccagtggctgtggcgagcagaacatggtcttgtttgctcccatcatctatgtcttgcagtacctggagaaggcagggctgctgacggaggagatcaggtctcgggcagtgggtttcctggaaatagggtaccagaaggagctgatgtacaaacacagcaatggctcatacagtgcctttggggagcgagatggaaatggaaacacatggctgacagcgtttgtcacaaaatgctttggccaagctcagaaattcatcttcattgatcccaagaacatccaggatgctctcaagtggatggcaggaaaccagctccccagtggctgctatgccaacgtgggaaatctccttcacacagctatgaagggtggtgttgatgatgaggtctccttgactgcgtatgtcacagctgcattgctggagatgggaaaggatgtagatgacccaatggtgagtcagggtctatggtgtctcaagaattcggccacctccacgaccaacctctacacacaggccctgttggcttacattttctccctggctggggaaatggacatcagaaacattctccttaaacagttagatcaacaggctatcatctcaggagaatccatttactggagccagaaacctactccatcatcgaacgccagcccttggtctgagcctgcggctgtagatgtggaactcacagcatatgcattgttggcccagcttaccaagcccagcctgactcaaaaggagatagcgaaggccactagcatagtggcttggttggccaagcaacgcaatgcatatgggggcttctcttctactcaggatactgtagttgctctccaagctcttgccaaatatgccactaccgcctacgtgccatctgaggagatcaacctggttgtaaaatccactgagaatttccagcgcacattcaacatacagtcagttaacagattggtatttcagcaggataccctgcccaatgtccctggaatgtacacgttggaggcctcaggccagggctgtgtctatgtgcagacggtgttgagatacaatattctccctcccacaaatatgaagacctttagtcttagtgtggaaataggaaaagctagatgtgagcagccgacttcacctcgatccttgactctcactattcacaccagttatgtggggagccgtagctcttccaatatggctattgtggaagtgaagatgctatctgggttcagtcccatggagggcaccaatcagttacttctccagcaacccctggtgaagaaggttgaatttggaactgacacacttaacatttacttggatgagctcattaagaacactcagacttacaccttcaccatcagccaaagtgtgctggtcaccaacttgaaaccagcaaccatcaaggtctatgactactacctaccagatgaacaggcaacaattcagtattctgatccctgtgaatgaggataggagctggaaactcaattagtcctctgtgacattactggagggtggaacattcttctgtcgcttgaagcagaactcattcaatcaaataatttaatttctctgactagtatatgggtaacaaatgaatatgtctgaacctcagctataatactttctactacctttgcaaggagatgggataggaacaatcactcagaggaggcgttgcatggacagggtcatagggggaagaaaggtggtttagctgttttatttagccattcagggggctctccagagaggagacggtggtagagggtgaactagagaagataagaatgtcttcctaggccggatgcggtggctcacgcctgtaatcccagcactttgggattgcgaggtgggcggatcacttgaggtcaggagttcaagaccagcctggccaacatggtaaaacccgtctctactaacaatacaaaaattagcctggtgtggtggcacgggcctgtaatcgcagccccttggaaggccaaggcaggagaatcgcctcaacactggaggtggaggttgcagtgagctgagattgtgccactgcactccagcctgggcaatgaggcaagaccctgtctcaaaaaataataaataataataataataatgtttttctagagtttcagtctaagggaaaatgtgatttagggctttggaaattggctaaaaaaataaaaatggaaaag

SEQ ID NO: 2354 - protein, 963 aa, Homo sapien
ELIGKGSLVMEGQKHLNSKKKGLKASFSLSLTFTSRLAPDPSLVIYAIFPSGGVVADKIQFSVEMCFDNQVSLGFSPSQQLPGAEVELQLQAAPGSLCALRAVDESVLLLRPDRELSNRSVYGMFPFWYGHYPYQVAEYDQCPVSGPWDFPQPLIDPMPQGHSSQRSIIWRPSFSEGTDLFSFFRDVGLKILSNAKIKKPVDCSHRSPEYSTAMGAGGGHPEAFESSTPLHQAEDSQVRQYFPETWLWDLFPIGNSGKEAVHVTVPDAITEWKAMSFCTSQSRGFGLSPTVGLTAFKPFFVDLTLPYSVVRGESFRLTATIFNYLKDCIRVQTDLAKSHEYQLESWADSQTSSCLCADEAKTHHWNITAVKLGHINFTISTKILDSNEPCGGQKGFVPQKGRSDTLIKPVLVKPEGVLVEKTHSSLLCPKGKVASESVSLELPVDIVPDSTKAYVTVLGDIMGTALQNLDGLVQMPSGCGEQNMVLFAPIIYVLQYLEKAGLLTEEIRSRAVGFLEIGYQKELMYKHSNGSYSAFGERDGNGNTWLTAFVTKCFGQAQKFIFIDPKNIQDALKWMAGNQLPSGCYANVGNLLHTAMKGGVDDEVSLTAYVTAALLEMGKDVDDPMVSQGLWCLKNSATSTTNLYTQALLAYIFSLAGEMDIRNILLKQLDQQAIISGESIYWSQKPTPSSNASPWSEPAAVDVELTAYALLAQLTKPSLTQKEIAKATSIVAWLAKQRNAYGGFSSTQDTVVALQALAKYATTAYVPSEEINLVVKSTENFQRTFNIQSVNRLVFQQDTLPNVPGMYTLEASGQGCVYVQTVLRYNILPPTNMKTFSLSVEIGKARCEQPTSPRSLTLTIHTSYVGSRSSSNMAIVEVKMLSGFSPMEGTNQLLLQQPLVKKVEFGTDTLNIYLDELIKNTQTYTFTISQSVLVTNLKPATIKVYDYYLPDEQATIQYSDPCE

SEQ ID NO: 2355 - DNA, 8011 bp, Homo sapien
cgcccctcgggggcggctgtggcggaggaacgatggccgacggcggcggccctaaggaggcgccaagcctgcggagctctcccgggccggcgccgcgggtcccgcgcgcggtcgggccgagtggcggtggcggggagaccccgcggaccgcggcgctggcgctgcgcttcgacaagcccattaagcaggccttctacaacaccggggccgtgctgttcgtgtgcctgtgctgcggcgccgcggtgctggtctacttcatcctggaggccttcctgcggccgctgctctgggccgtgctgtgcggcacttttctgcaccccttcaagagctcgctgacgcgcctgggccgccactggctgcagcgcctgcaccgcgcgcacacgcccatcgtcctggccgcgctgctcctgccgctctgcttcgtcgactacggcgtcgaggccctgggcgagcaggcgctgcgccgccgccgcctgctcctgctgctcggcgccggcggcccgctcctgtacggcctctactgcctcggcagctacttgggcgtgcaggtgctgctggtgcacgctgccacgctcatctgccgcgggctggactacttcagcagcctgtggatctggacgttggtggttggctatgtgttgactgtttcattcaagtggaatgcaagcactgaacgctacttgagagcagtttcaattcctgtctggattatattgctttttcatttagcatccctggctggctcatggagaattccagtattcctggttattgttttcctgatgtctgtgggtaccctctatgaaaaacagaatggaaaagagtcttctggggcagagttaccagggcaggttatctccatggcagcttctactctggcaaacttggccatctctatcacagggtatgaatcaagcagtgaagaccagccctccactcagcctgcagaagcagtggacaggggagaatccgctccaacgttgtccacctccccttcaccctcctccccttcacccacttccccttcacctactctgggcagacgaaggcctgaaataggaacgtttcttagaaagaagaaaactagtgacatctactttgtgtctctagtttgggccattgtcgtcatgcagatctggttgaacctgtggattgtgcagttgctgccagtgccgattgcagtctggatactcaaaaagcttgtcattcactttggagttgtggatttcctagagaaacgctaccatgtgtggtggggcattatagaaagcttcctgaaggagcggcagggagctctcgcgccttggcccattgtcgggcttggaaaattcttgttaaaagttgatagcaagctctggcactggctaaataagaagatgatcatctggttggagaagatgttagataaaataattagcattttcatcatatttttgttagtgataggaactcttcttttagccctactcctgactgcaaaggtacatcaagagagtgtacacatgattgaagtcacaagtaatttgattaatgaaactctagcaaatcaccctgagtgggcaaattggcttcctgaggctcaggtagtccaaagagccctgaattctgcggctaacaacgtgtatcagtatggacgagaatggataactcacaagctccataaaattctaggagataaggtgaacaatactgctgtaattgaaaagcaagtactagaactttgggacagactgtatcactcttggtttgtaaagaatgtaacacactctggaaggcacaaaggacagaagttgcatgtcagtcgtcagaatagctggctgggagacattctggactggcaggatattgtttcctttgttcacgagaacattgagacatttctttcgatcttggagtctctgtggatcgttatgagccggaatgtgagcctgctgttcaccactgtcactacactcttgaccatcctcttctacagcgggacagcccttctcaattttgtactctctctgataattttcctgaccacactattttatctattaagttccagtgatgagtactacaagccagtgaagtgggtgataagcctgactccactatctcagccaggtccttcttctaatattattggccagtctgtggaagaagctatcagaggggtgtttgatgcttccctcaaaatggctggcttctatggattgtatacctggctgactcatactatgtttggcatcaatattgtcttcataccatcagcattagcagcaatccttggagcagtgccattcctggggacatactgggcagcagtacctgcagttcttgacctgtggctgacacaagggttaggatgcaaggccattttactgttgatttttcatctcttgccaacatactttgtagatactgcaatctactctgacatatcaggaggtggccatccttacctgacaggcttggcagtggccggtggagcatactacctaggcctggaaggagcaatcatcggtcctattcttctctgcatacttgtggttgcttccaatatctatagtgccatgctagtgagtcccacgaattcagttcccacgccaaaccagaccccatggcctgctcagcctcagcggactttccgtgacatttctgaaagatctgaaatcttcagtaaggttgatgtggtttcctctgcagtgatttttctaaggaagttcaaatttgacagcgagttcagctcagctgtggccttctgcccttccagctgtgcctagcaagcaaaacccaggaaagaagcagaagcctcctggccttacatacagaatgcctggacaagagagaacttgctgcgggctgctttgtattttaaaacacagcttgagagttcagcgttggtggtttgctcacttaactgttgttaagatggcttgaaaagtttcattttatacactggtaccctggcttgaaatttttccactttggttatctatgttactatattatatatttataaagttattttaagaactctaaactacctgctgttaaaagaatagatggtgtaattttttcctggtttaagaaatgtattgttaaacttttctaagacagtcacttttcaaggaagagggctttcacttttgagtgtgtagttgagtgagcaggaaaaatgaatcttctacccttctcccacaatgtattatacgctctttaagaaataataaatcataagtataagggtggggtggcttatttgatgttcagttttatattataaccctgggagatacaaagactgaagctcttcctcctcttccttttctcttcacgcttctttacactattgccaaattattaaaacttgggctgaccacgttggaagtgaaatacttattaagctgctatgaatggtaacagtatgataaaattcatgctgttattaggttttctccttccaggtggttgaagtgaaaaatctcaggtgtagcaatactctgatttgttaaatgtatccgtttcattatttggaactctgccaataagttagttttcagcagaattttgtatttatgtagtattttcccatctcttagcacagtgccttgcacatgactctaaatgaatcttgttgaattgaattgcaactttaaaaatatctcagatatcacaataaccagcatagtgctttacattttacaaagtccttttgcacatactatttcacaagtacatcacatcagctttcatatagctttatattattttacatcagttttacactgatggagaagctaaggttcagaaaagtgaccaactcaaagtcgtaaagtgtagtaggatttggcctcagatctttgactccgttgtgtgcagattctgctgtattagtgttccttctaaatattgtatgcagttttcccagtgttacgagattggtgttgctatccatttgttgtgaatgaagacttgtcctatagtacatacagggctgagagtggactgtagttcttagctgaaccctttctactgtttaaaacaatcatcaggcctatcctctgctcccaggggaatgtgggagagaaaagggttcttggccaggctgtaggtggtggctcacatctgtaatcccagcactttggaaggctgaggtgggtggattgcttgagcccagggatttgagatcagcctaggcaacatggcaaaaccccatctcgacaaaaaaaaaaaaaaaaaaaaaaaaattagctgggcacggtggtgtggctatagtctgagctactcaggaggctgatgtatgaggatcacctgagtccaggaggtcgaggctgcagtgagccaagatggcgccactgcactccagcctgggtgagagagtgagacactgtcccaaggaaaaaaaaaaagtgttggggggtagttcttaagcgttgaagatttcctttttggaaagtatttaaaggtagaaatattaataatttttcctaaaacatctccctaagaagtcactgataattataattagtttaaatttattcttacactacttaagaaaaatttcatttagaaaaggctaccatgagatcttttgactatatggagtagactgcatacagatctctttatttctattatgaatattttagcgattataatcagctattccactgagtattagatttggtcactaagtaactcatgtttttctttagtcaatcattcattcattcactaaaacatttgttgagagttggctaaactctagattctgtgccaggcactgtacagggtgatggagatcactcataagaaggcctcttgctcttagccagatcatatgtaatactaaatttaaattttttgcattaaaaggctaaaaaatcatttgtttttgttaattatatactggttgatttatagatgtaattagcacatattcataagagacaaatatatacaatgagttactatacatatacaaagtgattttagctgtataaagtgatattgcaaaaaactacagctaatgtttcttgctgggtaattattagcataaatatcaggttcttagaggtctttaagagaatactttagagctaccaaaattagcagcagtgatgtaatatcaccctgaaataccaggagcagaggtgccccagagtgcttcacagctatgatcaggaaacttgacctgccccattgctacagcaacggcataaggactaggaaggtccactagctggggaggtcttggaaccctccgagccagaaagaagcattccagcatgattcctcagatgcaatgaggaaggtttacagaattttcacagggcaacagagatcaagtggtatgaaaaggtaggagttttaagctcaagtctcaaagataacctacctttacattctcagtcagaatttgacccagaaagaggaagtttcttcaggaacagaccgtacgttgatgaagtagaagtcatttcagtaaaaacggagtacagaacttggtcataatatcttgcattttatagatttattaaagattagtttcaagttcacattcgctattcagttgtaaaccgaatggatgggaggggagaaaatacaagctctccacacaggtatgctcctctcttttctgagagagaaggcatgggattttcagcataaattccatgttatgtgagtgctgtttgagttctgaagttcctatcaatatctgttcctgcaagtgatctctgtaagaccaccttacatgctggtcttagttattgttaaaattgcaaggtttcttcacaccctctttgataagaagtgtttagctggcagagctttcccttgacttctgagtctagtgtgggttggcccatgacagtgggaagaaatccaacatgttacatggagaccttgtatgtaaacaaactctgtagcctttgaaagtggaactgctttttacagttaaagggctgctaaatcgcttgcagatgagatcttctggctcaccttgatcttcacatgaacccattgtgacctatctggatttcctaggacctgtagtttccatttgggttatattagtgcctcaggaatgtgtcactactggtcaagcaatactcagaaattcaggctgtgaggggttagattagaggaaagtaatttaggtgagctatccagagctttcaacctcagggtttataggaaaaaaaaaacaaaatacaaaaacccttaggacttctcatactctagccctgaccttgcagtctcctctgaggggcctcctaagacccttaaaataatattacaataggactttgagtgtgcatttcacagtggaaatagcctctggctagcattacttccaaatgctagttccagctaaaaacaagtactttttattagtttcttgtctttcaacattctgccatcaaaatatattcattttattaacttaccgattattgggaactgcaaaaaaaaaaaaaaaaaaacacacatgctgtctgcagccactgtttggttatttttgatagtttaagagaattataaatcaagttgttctgtctactagagtcagaaattctgtgctagaatgggacttctaaaattaggtggtcctgtcactttctagagaaagacccaaattcataggtttaagtggcttgtctgacatacacatacagccagttagtaacagaattcagaatagaatagagttcttttttttctgcagtccgttgttctacttctctttccttttcttcatggttgagcagcttttggcaaaatgtgttccatatagcagtagttccaagagatgttaatagatgtaagaaaaaaagtgtgtgtgtgttgggggtgggggattgcatggtcaattaaaatgaaggaatgctgagtttgtttccttactgtaggacttctaagagttttgaacatgctattacacattgtgaatttataaaaggggacaaacactgtttgaccttagactgcactccccttctttattcctcagagcatctcaaaggactacagggtcctttgagaaacatggcccttgatcaagtttacaactctttgagaagacatccctaatggaaatactgaatggcagatctattactgtggtaccatgtagtgtgtaataaatcttgaagtccagaaagcaagtatatttgctgtttagagctatacttaaggtatagagattcttttccacctgtggtgtgtaaaatcagtattgtgtttaattttgcaggtttttcaaggatcaactaatgtgcaaatacagtggtgatatattgatattacattttaataatgcttttgtatggcactttatagttttcagacaccttttgtaacagccctgtgagacagacaatattatccttattgtacagatgggggggctctggaggctctgaaaagtttttggtgatattcccctaagtttataccacaaaatgatggagccagaatttagttgcagaacttctgactccaagtccagagttctttactagacatctggtttcttactagctttttgctagctttttattttacagtgaaaagtatggaagcaaatcctgataattttggcttattatcaaatatcatttattttttattgcagagacccagcagatgtaactctcattgtagccatcccaaagaaaacccttctttgccctttgcagtgccacttatttaggtaactgaagtgtatttccagtacaatttgattttgaactaagatttgatatagagttgtaattgcttacataactctttgaaaatgtatcatccctgggttctcaggtgaaagaggcaattcaaaagtaaaaaagaatattcgaatacaataaataccctctgttctcacacaaatgctgtttcttagctaacttgctttgacaacctactgatgtaacttctttattaatgtgaaatatttatattttgaaataaaattactagtgttgaatgaatcatgtggtaaaaaaaaaaaaaaaaaaaa

SEQ ID NO: 2356 - protein, 911 aa, Homo sapien
MADGGGPKEAPSLRSSPGPAPRVPRAVGPSGGGGETPRTAALALRFDKPIKQAFYNTGAVLFVCLCCGAAVLVYFILEAFLRPLLWAVLCGTFLHPFKSSLTRLGRHWLQRLHRAHTPIVLAALLLPLCFVDYGVEALGEQALRRRRLLLLLGAGGPLLYGLYCLGSYLGVQVLLVHAATLICRGLDYFSSLWIWTLVVGYVLTVSFKWNASTERYLRAVSIPVWIILLFHLASLAGSWRIPVFLVIVFLMSVGTLYEKQNGKESSGAELPGQVISMAASTLANLAISITGYESSSEDQPSTQPAEAVDRGESAPTLSTSPSPSSPSPTSPSPTLGRRRPEIGTFLRKKKTSDIYFVSLVWAIVVMQIWLNLWIVQLLPVPIAVWILKKLVIHFGVVDFLEKRYHVWWGIIESFLKERQGALAPWPIVGLGKFLLKVDSKLWHWLNKKMIIWLEKMLDKIISIFIIFLLVIGTLLLALLLTAKVHQESVHMIEVTSNLINETLANHPEWANWLPEAQVVQRALNSAANNVYQYGREWITHKLHKILGDKVNNTAVIEKQVLELWDRLYHSWFVKNVTHSGRHKGQKLHVSRQNSWLGDILDWQDIVSFVHENIETFLSILESLWIVMSRNVSLLFTTVTTLLTILFYSGTALLNFVLSLIIFLTTLFYLLSSSDEYYKPVKWVISLTPLSQPGPSSNIIGQSVEEAIRGVFDASLKMAGFYGLYTWLTHTMFGINIVFIPSALAAILGAVPFLGTYWAAVPAVLDLWLTQGLGCKAILLLIFHLLPTYFVDTAIYSDISGGGHPYLTGLAVAGGAYYLGLEGAIIGPILLCILVVASNIYSAMLVSPTNSVPTPNQTPWPAQPQRTFRDISERSEIFSKVDVVSSAVIFLRKFKFDSEFSSAVAFCPSSCA

SEQ ID NO: 2357 - DNA, 1728 bp, Homo sapien
ccaagatggcggcggcggcggctcccggaaggccgcggcggcgtcccggctgctaaggcgggccccacgcggctggcagcggacaggccggacctacggccggaggacgggcggcagccgcctctgcgcggaccggggctgggccgtgcggcggcagcggcgccaagggatgctcttgctgggcctgcctctcccttctcaacttaaggcggcggcgggccgcgccctggctcccgggccatggcgctgagggagctcaaagtgtgtctgctcggggatacaggtgtaggtaaatcgagtattgtgtggcggtttgtggaagacagttttgatccaaacatcaacccaacaataggggcatcttttatgaccaagactgtccagtaccaaaatgagctacataaattcctaatctgggatacagctggacaagaacgatttcgtgccttagcaccaatgtactatcgagggtcggctgcagctataatcgtttatgatatcacaaaagaagagacattttcaacattaaagaattgggtgaaagagcttcgacagcatggcccacctaatattgtagttgccattgcaggaaataaatgtgatcttatcgatgtaagagaagtcatggagagagatgcaaaggactacgccgactctattcatgcaatttttgtagagaccagcgcaaaaaacgcgataaacataaatgaactctttatagaaattagtcgaagaattccatccactgacgccaacctgccatctggcggtaagggcttcaaactccgaagacagccttcagagccaaagcggagctgctgctgaccgaacctcagcctctcagacttgatgatgaagtaggtggtcctgaaagttaacaggagggctggggtccctgccaccagttttcacctagccagtcttgagtcttgtccgtgcaaaaaggattcacagaaatggaccagttctgttctccaaagactgcagcaatgatatttcagtctgtgaacttctattatgtaaagaatctctagtgtacaaagggactacatcgttggcttttgaccttgctgaaaaggaacatataattgtatggatggtaggattaagttgttgagtagttttgtaatcaagattttatgtaacatttgtaaagggaaaattagcacttttgtggttcttaagggaaaagaaacagaccttgtggagattataatttccttggtttctgttaccactgttagagggagttgtatcaatttaacatatagtaaggatagtttaagtgtagggaggacaataattgtctgtaagctaaaatgggttatttataggactgatggaaatgatttcatctctgccatctctaaagcacttttcattgaacatgttagcctaggatacgtacagtaaattaacaatgatagcagcagatgcctagctcatcctgggtttgcttctgaccttgtcatgtgtgtgccaccaaacacgttattggcacctttttaaataagctctcatgatcaagatggtgatggtagagaagctgcccggaataaactgaatttcatatgttctaaaatgactagcaatggtttaaaaaggaagaagagtggaagtgaagaaggtggtataaatgctgtcaatttttttttaacccaagtattttggtggggaaaagcaagtatctattgcttagcatatgtaaagttgtagtctatatttatg

SEQ ID NO: 2358 - protein, 194 aa, Homo sapien
MALRELKVCLLGDTGVGKSSIVWRFVEDSFDPNINPTIGASFMTKTVQYQNELHKFLIWDTAGQERFRALAPMYYRGSAAAIIVYDITKEETFSTLKNWVKELRQHGPPNIVVAIAGNKCDLIDVREVMERDAKDYADSIHAIFVETSAKNAININELFIEISRRIPSTDANLPSGGKGFKLRRQPSEPKRSCC

SEQ ID NO: 2359 - DNA, 2887 bp, Homo sapien
cccacgcgtccgtgttcgggaagtggatccgccgctgccggagcagcccgaagggagctgcggatcgcgaggccagtaccgaccccgcccgcccgcgcgcaccgcccccgcccgccatggcccgggactacgaccacctcttcaagctgctcatcatcggcgacagcggtgtgggcaagagcagtttactgttgcgttttgcagacaacactttctcaggcagctacatcaccacgatcggagtggatttcaagatccggaccgtggagatcaacggggagaaggtgaagctgcagatctgggacacagcggggcaggagcgcttccgcaccatcacctccacgtattatcgggggacccacggggtcattgtggtttacgacgtcaccagtgccgagtcctttgtcaacgtcaagcggtggcttcacgaaatcaaccagaactgtgatgatgtgtgccgaatattagtgggtaataagaatgacgaccctgagcggaaggtggtggagacggaagatgcctacaaattcgccgggcagatgggcatccagttgttcgagaccagcgccaaggagaatgtcaacgtggaagagatgttcaactgcatcacggagctggtcctccgagcaaagaaagacaacctggcaaaacagcagcagcaacaacagaacgatgtggtgaagctcacgaagaacagtaaacgaaagaaacgctgctgctaatggcacccagtccactgcagagactgcactgcggtccctcccccagcccgaggcccacggaggttcctcgggggacagtctcagtttcgtgccgttatttaaagaattctctccatgtttttgtatcgggaggtgccatcggcacttcctcccccgccctcctcgagtgccaagaaggtgttggaccagcccgcccttccctactggtgccccctcctccccggccaaggcgcctggacctggcgaggacgctgcccgccgagcggactgattcgcagagtctgtacatagtgtatattgctctacccggccgcacaccacgtcctgctctggcttttgccttcttgatgccagcctgctgcaacagaccctccccgcgcccctccccagcccatcttactgcaagcagcgtcctgaggagacagcggcacgttctagctgcgtctgcggccagcccgtgccagtggagtgggctccgcgttgctcattctctccgacaggttgtcagcctctgtccccgctgcacagggtcttgccccttctccagggcctgtgccagctcccttccctccccgttgtcctgtccccacagccattctgggagctggggaacctggtctcaaggcaggccctgcagttccacagaggtggcaggtcttgccctttggccaacagatttcttgtcctgccttctagatgcctctgagctccaaacccagggcagccatggcttctcatttacaccaacaggtttcagttccaacagaaaggtcggggtaggttcgtgcagagatggggctggcaggggggctatgggaggattattttaacagatcaagaaaatgaagccaaatcaagtgaattaaattcctcacaattattttctttccctgaggtttgattggcacagcagcaaaagttgaggccaccccacttgtgtccactgtttttagaaaaaaatgaatggcttcctgccattgtggggctggactcttgggctttcttggtgggagcggagaaggggcctcccacccttgtccgagttgcctcccactggaggtcaggagtctacactgcagcctcaggcactgtggggagtgcatgcctggggcctctgggtggggaccatggacaggccctggtcactgtcctaacctttgtcaggacaaaggtagcaagaggatttcctggcgggtgggaaggaatggctggggcggccagttttgacacgccccagtgccctggagaacaaccagggtcatctgcacttgatgactgctccccgacccccagcccggacacctcattcccctcccactacagggatcaagtgacctgggaagaaccgagttcaacaccaggatgtgtttccttagatttcctttcctaggcgatttccagggagagccctgattggacaatcacatcacagatcacactgcagtttccatgttagcactgtggatgggtttttaatcaataaaaactgggggtttcttctcaccgactctccacttgcccaaactgccaaaagctggtgattctgggacaggccttcactttggagccacgggatggggtgggggagccccatgggcctgggaaggagggtgctgtggagggggctgcagggctgaccagcaggcagcctcatctggtcgggggcgggggcggcaggagcagaagcggggtctccgtccttgggactgtcctggttggccacgggccctgaggatgcacggtgcctggggctcctgtgccggtgggcggggggcatgctggcctctgagcgatcaggcgaggccagcgagggtgtgcttgcaaattcaagcaataagaggggggttcctgggggcttccagcccaggctagaagcccccatggcttctggcagctggacatcagccccaggtattggggtgattttggtcatgacagtgtgcctgtcccactgttacacgcatgaatgggggttatggggtgggggtggggactcagggctggaccgacgtcctagtggacctgatgtgaaattcctgtcaaacaaacaccacttttcaatggtttgctaggagtatttctgtattgaaagtttctaattatgctttttaaaaaaatactaaaaataaaggttcaagctgccaaattttaaaaaaaaaaaaaaa

SEQ ID NO: 2360 - protein, 201 aa, Homo sapien
MARDYDHLFKLLIIGDSGVGKSSLLLRFADNTFSGSYITTIGVDFKIRTVEINGEKVKLQIWDTAGQERFRTITSTYYRGTHGVIVVYDVTSAESFVNVKRWLHEINQNCDDVCRILVGNKNDDPERKVVETEDAYKFAGQMGIQLFETSAKENVNVEEMFNCITELVLRAKKDNLAKQQQQQQNDVVKLTKNSKRKKRCC

SEQ ID NO: 2361 - DNA, 1485 bp, Homo sapien
tcagccaattagagctccagttgtcactcctacccacactgggcctgggggtgaagggaagtgtttattaggggtacatgtgaagccgtccagaagtgtcagagtctttgtagctttgaaagtcacctaggttatttgggcatgctctcctgagtcctctgctagttaagctctctgaaaagaaggtggcagacccggtttgctgatcgccccagggatcaggaggctgatcccaaagttgtcagatggagagtaaatacaaggagatactcttgctaacaggcctggataacatcactgatgaggaactggataggtttaagttctttctttcagacgagtttaatattgccacaggcaaactacatactgcaaacagaatacaagtagctaccttgatgattcaaaatgctggggcggtgtctgcagtgatgaagaccattcgtatttttcagaagttgaattatatgcttttggcaaaacgtcttcaggaggagaaggagaaagttgataagcaatacaaatcggtaacaaaaccaaagccactaagtcaagctgaaatgagtcctgctgcatctgcagccatcagaaatgatgtcgcaaagcaacgtgctgcaccaaaagtctctcctcatgttaagcctgaacagaaacagatggtggcccagcaggaatctatcagagaagggtttcagaagcgctgtttgccagttatggtactgaaagcaaagaagcccttcacgtttgagacccaagaaggcaagcaggagatgtttcatgctacagtggctacagaaaaggaattcttctttgtaaaagtttttaatacactgctgaaagataaattcattccaaagagaataattataatagcaagatattatcggcacagtggtttcttagaggtaaatagcgcctcacgtgtgttagatgctgaatctgaccaaaaggttaatgtcccgctgaacattatcagaaaagctggtgaaaccccgaagatcaacacgcttcaaactcagccccttggaacaattgtgaatggtttgtttgtagtccagaaggtaacagaaaagaagaaaaacatattatttgacctaagtgacaacactgggaaaatggaagtactgggggttagaaacgaggacacaatgaaatgtaaggaaggagataaggttcgacttacattcttcacactgtcaaaaaatggagaaaaactacagctgacatctggagttcatagcaccataaaggttattaaggccaaaaaaaaaacatagagaagtaaaaaggaccaattcaagccaactggtctaagcagcatttaattgaagaatatgtgatacagcctcttcaatcagattgtaagttacctgaaagctgcagttcacaggctcctctctccaccaaattaggatagaataattgctggataaacaaattcagaatatcaacagatgatcacaataaacatctgtttctcattcc

SEQ ID NO: 2362 - protein, 343 aa, Homo sapien
MESKYKEILLLTGLDNITDEELDRFKFFLSDEFNIATGKLHTANRIQVATLMIQNAGAVSAVMKTIRIFQKLNYMLLAKRLQEEKEKVDKQYKSVTKPKPLSQAEMSPAASAAIRNDVAKQRAAPKVSPHVKPEQKQMVAQQESIREGFQKRCLPVMVLKAKKPFTFETQEGKQEMFHATVATEKEFFFVKVFNTLLKDKFIPKRIIIIARYYRHSGFLEVNSASRVLDAESDQKVNVPLNIIRKAGETPKINTLQTQPLGTIVNGLFVVQKVTEKKKNILFDLSDNTGKMEVLGVRNEDTMKCKEGDKVRLTFFTLSKNGEKLQLTSGVHSTIKVIKAKKKT

SEQ ID NO: 2363 - DNA, 2799 bp, Homo sapien
gaaactggccctggccctgaaccaaataccttgaaccctcgtaaactccataccctgacccccttgttttggatatacccaggtagaacaactctctctcactgtctgttgtgaggatacgctgtagcccactcattaagtacattctcctaataaatgctttggactgatcaccctgccagtcttttgtcttgggcaatctatacttttctcagaggttcccaaggcctactgaagggacttaacatactcttaatggctttcctctctcttgttttaccttatgccctcacttcctgagttaacctcccaaatacaggatcacctgtacccaagcccttagctcaagaatacaggatcacctgtacccaagcccttagctcaagctctgctttggaagaacccaaactaagacagtgctcctggtgccctccccaagcaacctcaagttctggctgttacttgagcagaggcctttcttttcccttcccccagctctatccatctgccaggcccccctcaaatctcttcatttccaagttttgcttgacttttccaagaggagagggctgcttcttagtatgtccctactcatcctttcctttcttgtcttgtatcctggtgcagcctggtaatggggcctcttcatggttgtgtgtcatgactccctaaccattatgcctccatgcatcccctgttcctcctggaacctagcaccatgccttacatggaaaagctgtcattgacagcccggtgagagccctgagggtggagtgactggggcagggcctgaggcaagaggtgggaggaggtaggaggccaggggctcagccggaccaggagactggaaacaggcaaggataaggcaggtgggggactgagttgtttgggtcacctctgcaggccagagagaccaggcaacatacacactgcagaaggtgggctgggaggattggggccagagctgggggagggatgagaacagaagcaggaccaggattcagcagagtcctcctatttccttccaccaccagggaatcttactgccccacttcagcttgtgctgtttcctggcaaggcaggctctcacatgcctggacgcctgggtgcgttggtgatgggaaggagcagggtgagggaggggccccaggagaggcccaggatgagcctcatcttgtccctccccattcttgtcttaccctctgcaaatgtgataggcacaggacaggagtaggcacctcgcctactgctgcttaacctttcagcttctccaggcccccaatcctgcttgctcccagcttggtaagtagatctgtgcacgtccctttacaccccaccatccagttttgcccagatgtgctagaatggggctggacaaagaaggaggggccagactagaggagtggtggtagagatagtgacagcctggggtgaggactttatgcctgtttaccactgagctctgggaaggaggccaggagtggggcaggtcaactgactgggagcaggggatctgggttccaagaaggagttgtgtttgaggtggggtctgggtcctcgtggaagtcaggactcccaggcagaaaagaggcaggctgcagggaagtaaggaggaggcatggcaccttctcatcgggcatcacaggtggggttttgccccacccctgaacgccctctgtggcgccttccacccacctgtaggcccagaaggatgtcggtctgctaccgtcccccagggaacgagacactgctgagctggaagacttcgcgggccacaggcacagccttcctgctgctggcggcgctgctggggctgcctggcaacggcttcgtggtgtggagcttggcgggctggcggcctgcacgggggcgaccgctggcggccacgcttgtgctgcacctggcgctggccgacggcgcggtgctgctgctcacgccgctctttgtggccttcctgacccggcaggcctggccgctgggccaggcgggctgcaaggcggtgtactacgtgtgcgcgctcagcatgtacgccagcgtgctgctcaccggcctgctcagcctgcagcgctgcctcgcagtcacccgccccttcctggcgcctcggctgcgcagcccggccctggcccgccgcctgctgctggcggtctggctggccgccctgttgctcgccgtcccggccgccgtctaccgccacctgtggagggaccgcgtatgccagctgtgccacccgtcgccggtccacgccgccgcccacctgagcctggagactctgaccgctttcgtgcttcctttcgggctgatgctcggctgctacagcgtgacgctggcacggctgcggggcgcccgctggggctccgggcggcacggggcgcgggtgggccggctggtgagcgccatcgtgcttgccttcggcttgctctgggccccctaccacgcagtcaaccttctgcaggcggtcgcagcgctggctccaccggaaggggccttggcgaagctgggcggagccggccaggcggcgcgagcgggaactacggccttggccttcttcagttctagcgtcaacccggtgctctacgtcttcaccgctggagatctgctgccccgggcaggtccccgtttcctcacgcggctcttcgaaggctctggggaggcccgagggggcggccgctctagggaagggaccatggagctccgaactacccctcagctgaaagtggtggggcagggccgcggcaatggagacccggggggtgggatggagaaggacggtccggaatgggacctttgacagcagaccct

SEQ ID NO: 2364 - protein, 389 aa, Homo sapien
MAPSHRASQVGFCPTPERPLWRLPPTCRPRRMSVCYRPPGNETLLSWKTSRATGTAFLLLAALLGLPGNGFVVWSLAGWRPARGRPLAATLVLHLALADGAVLLLTPLFVAFLTRQAWPLGQAGCKAVYYVCALSMYASVLLTGLLSLQRCLAVTRPFLAPRLRSPALARRLLLAVWLAALLLAVPAAVYRHLWRDRVCQLCHPSPVHAAAHLSLETLTAFVLPFGLMLGCYSVTLARLRGARWGSGRHGARVGRLVSAIVLAFGLLWAPYHAVNLLQAVAALAPPEGALAKLGGAGQAARAGTTALAFFSSSVNPVLYVFTAGDLLPRAGPRFLTRLFEGSGEARGGGRSREGTMELRTTPQLKVVGQGRGNGDPGGGMEKDGPEWDL

SEQ ID NO: 2365 - DNA, 2217 bp, Homo sapien
ttttcagtgcctcttctgtcacaatcgtagacacggtcacactccagtatctgggaaaacacagagatcgctatgggttgcagcgcatgtggggctccctgggctggggcctggcgatgctgtctgtgggcatcgggatcgactacacccacatcgaagtgctcatcgatggaaaggggtgtaagccccccgagtacaggaattaccagatcgtcttcatcgtcttcggcgttctcatgaccatggccttgatcgttgccactcagttccggttccgctacaaccatttcaaaaacgatgattctaaagggaaagaggtggagatcccgcaggtggaaaggaacaactctacagagtcctctgaggagacaccaaccaccacaagccactcgcaggccttcaacttttgggacttaatcaagctgctctgcagcgtgcagtatggctcagtgctgtttgtggcttggttcatgggttttggatatggcttcgtgttcacctttctctactggcatttggaagacctcaatggaactacaaccctctttggggtctgttcagtcctgagtcatgtgtctgagctgacagcatatttttttagtcacaagcttattgaattgatcggccacatcagggttctgtacattggcctggcctgcaatacggctcgctatatttatatttcctacctggagaatgcctggactgttctccccatggaagttcttcaaggagtgacacacgcggccatctgggcagcatgcatttcttacctcagtgcagccgttccccctgagctgaggacatctgctcagggcatcctgcagggccttcacctgggtttgggaagaggatgtggtgccatgatcggaggcgtgttagtcaattattttggggctgctgcaaccttccgaggaattggcatggcctgcttggtgatcctactgctctttgccctgatccagtggctggcagtgccagatgaggaagaagacaagacaatgttggcagaaagaattcctgttccctccagtcccgttcctatagcaaccatcgacttggtacagcaacagacagaagatgtcatgccacgcattgagcccagacttccacccaagaaaactaagcaccaggaagaacaggaagatgtgaacaaaccagcctggggagtcagctcttctccctgggtgacctttgtctatgcactctaccaaattaaagagatgatgcaactcacaagagacaaccgtgcttctgagatacagcctttacaggggaccaatgggaatagggaaaattctcctgctggtagagcccagcctgtcccatgtgagactcactctgacccatctagaaaccagccatcccctgacgcagcagcatctcagacgcagaccagccccgctcaccccagtgtggacccgtgcacagaggagagtgaagagcagcaggctcagctggccgcgggaggacactgagggcatcctgctcatctcacaccctgcatggaatcaggctcctcagccaggacacagggtgaggccccccagccaggatatgcctcccctggaggagcacagcactgcatatgcttctaaatatctaaactcattaacatggaaacacacacacaggagctacagtacatattggcagaaaaaggtaaactttcgtaatctcattggaattacaacagggaaatggagttcaatgaggactttcagttctttgcttggttaggttaaggatgatagaatttctctgccagtgcagtaagagttgaaaccggcagttacactaagtaagtggagggaatgaaagtgtttcgaggtgaatgtggatataatttccctcttctgattatttattcttatttggttcctaacacaaactgggaagagatagaattcatctatactttcttttttcttggagagaaccgtttaaaaaattacaagatatatttaaaaagtaaccagataaaagtagcacatgtgcttttgttaaaaataaagttaaaagttaaagttaaaaaatgaagttaaaagtttcatcagaaactttacatatctttagcaaatatatttttatatgtgtatggcatataatggaaataattctttgagcaacagaagctattattaactactgcaagctaagccgagcttaaaaatgccttttgttttaaatgggctttgagaaaaaaaaaaaaaaaaa

SEQ ID NO: 2366 - protein, 463 aa, Homo sapien
MWGSLGWGLAMLSVGIGIDYTHIEVLIDGKGCKPPEYRNYQIVFIVFGVLMTMALIVATQFRFRYNHFKNDDSKGKEVEIPQVERNNSTESSEETPTTTSHSQAFNFWDLIKLLCSVQYGSVLFVAWFMGFGYGFVFTFLYWHLEDLNGTTTLFGVCSVLSHVSELTAYFFSHKLIELIGHIRVLYIGLACNTARYIYISYLENAWTVLPMEVLQGVTHAAIWAACISYLSAAVPPELRTSAQGILQGLHLGLGRGCGAMIGGVLVNYFGAAATFRGIGMACLVILLLFALIQWLAVPDEEEDKTMLAERIPVPSSPVPIATIDLVQQQTEDVMPRIEPRLPPKKTKHQEEQEDVNKPAWGVSSSPWVTFVYALYQIKEMMQLTRDNRASEIQPLQGTNGNRENSPAGRAQPVPCETHSDPSRNQPSPDAAASQTQTSPAHPSVDPCTEESEEQQAQLAAGGH

SEQ ID NO: 2367 - DNA, 1103 bp, Homo sapien
cttcggtcctgctgtagtgccttctgcgccaggcccggttcaatcagcggccacaactgtctagggctcagacaccaccagccaatgagggagggcacgtggagccgcgtctgggctcgcggctcctgaccaatggggaagtggcatgtgggagggcgccggggttccccccgccaatggggagctacggcgcgcggccgggacttggaggcggtgcggcgcggcgggtgcggttcagtcggtcggcggcggcagcggaggaggaggaggaggaggaggatgaggaggatgaggaggatgtgggccacgcaggggctggcggtgcgcgtggctctgagcgtgctgccgggcagccgggcgctgcggccgggcgactgcgaagtttgtatttcttatctgggaagattttaccaggacctcaaagacagagatgtcacattctcaccagccactattgaaaacgaacttataaagttctgccgggaagcaagaggcaaagagaatcggttgtgctactatatcggggccacagatgatgcagccaccaaaatcatcaatgaggtatcaaagcctctggcccaccacatccctgtggagaagatctgtgagaagcttaagaagaaggacagccagatatgtgagcttaagtatgacaagcagatcgacctgagcacagtggacctgaagaagctccgagttaaagagctgaagaagattctggatgactggggggagacatgcaaaggctgtgcagaaaagtctgactacatccggaagataaatgaactgatgcctaaatatgcccccaaggcagccagtgcaccgaccgatttgtagtctgctcaatctctgttgcacctgagggggaaaaaacagttcaactgcttactcccaaaacagcctttttgtaatttattttttaagtgggctcctgacaatactgtatcagatgtgaagcctggagctttcctgatgatgctggccctacagtacccccatgaggggattcccttccttctgttgctggtgtactctaggacttcaaagtgtgtctgggatttttttattaaagaaaaaaaatttctagctgtcaaaaaaaaaaa

SEQ ID NO: 2368 - protein, 234 aa, Homo sapien
MGKWHVGGRRGSPRQWGATARGRDLEAVRRGGCGSVGRRRQRRRRRRRRMRRMRRMWATQGLAVRVALSVLPGSRALRPGDCEVCISYLGRFYQDLKDRDVTFSPATIENELIKFCREARGKENRLCYYIGATDDAATKIINEVSKPLAHHIPVEKICEKLKKKDSQICELKYDKQIDLSTVDLKKLRVKELKKILDDWGETCKGCAEKSDYIRKINELMPKYAPKAASAPTDL

SEQ ID NO: 2369 - DNA, 3292 bp, Homo sapien
ggcacgaggaggagaagagcaaagaaaagcagtccgtctggatttgtttgcccaggactggcgccgcgcacgcggatcgccgaggggagtgcggtcggagtcaccgcgcccccgcctccccgcccgggcagctgaggccgggggttggagcgctgcccccgcgcacagtccccgagcgcccgacgtctccgcgcaggttcttgaagcagctgggcctggggcgcccactaatgtggccctgagggccggagcccgcaccgacgggagcgggagccggagcagctgcgggcgccgagtggccggtgcgcccggcggagcgcgcgtgcgtggccagcgcgctccccgcttctgcttggctttccggcttaattttcctcggcgggattaaagttggaaattgaccggagaattgagttgccggggaacagagccccggccgccgccagagcgatgttcccgcagagccggcacccgacgccgcaccaggctgcaggccagcccttcaagttcactatcccggagtccctggaccggattaaagaggaattccagttcctgcaggcgcagtatcacagccttaaattggaatgtgagaaactggcaagtgaaaagacagaaatgcagaggcactatgtgatgtattatgaaatgtcatatggattaaacattgaaatgcacaaacagactgaaatcgccaagagattgaatacgatttgtgcacaagtcatcccatttctgtctcaggaacatcaacaacaggtggcccaggctgttgaacgtgccaaacaggtgaccatggcagagttgaatgccatcatcgggcagcagcagttgcaagctcagcatctttctcatggccacggacccccagttccccttacgcctcacccttcgggacttcagcctcctggaatcccgcccctcgggggcagtgccggccttcttgcgctgtctagtgctctgagtgggcagtctcacttggcaataaaagatgacaagaagcaccacgatgcagagcaccacagagacagagagccgggcacaagtaattccctcctggtcccagacagtctaagaggcacagataaacgcagaaatggacctgaattttccaatgacatcaagaaaaggaaggtggatgataaggactccagccactatgacagtgatggtgacaaaagcgatgacaacttagttgtggatgtgtctaatgaggacccttcttctccgcgagcaagccctgcccactcgccccgggaaaatggaatcgacaaaaatcgcctgctaaagaaggatgcttctagcagtccagcttccacggcctcctcggcaagttccacttctttgaaatccaaagaaatgagcttgcatgaaaaagccagcacgcctgttctgaaatccagcacaccaacgcctcggagcgacatgccaacgccgggcaccagcgccactccaggcctccgtccaggtctcggcaagcctccagccatagaccccctcgttaaccaagcggcagctggcttgaggacacccctggcagtgcccggcccatatcctgctccttttgggatggtcccccacgctggcatgaacggcgagctgaccagcccaggcgctgcctacgccagtttacacaacatgtcgccccagatgagcgccgcagccgccgcggccgccgtggtggcctacgggcgctcccccatggtggggtttgatcctccccctcacatgagagtacctaccattcctccaaacctggcaggaatccctggggggaaacctgcatactccttccacgttactgcagacggtcagatgcagcctgtcccttttccccccgacgccctcatcggacccggaatcccccggcatgctcgccagatcaacaccctcaaccacggggaggtggtgtgcgctgtgaccatcagcaaccccacgagacacgtgtacacaggcgggaagggctgcgtcaaggtctgggacatcagccaccctggcaataagagccctgtctcccagctcgactgtctgaacagagacaattatatccgttcctgtaaattgctacccgatggctgcactctcatagtgggaggggaagccagtactttgtccatttgggacctggcggctccaaccccgcgcatcaaggcggagctgacgtcctcggcccccgcctgctacgccctggccatcagccccgattccaaggtctgcttctcatgctgcagcgacggcaacatcgctgtgtgggatctgcacaaccagacactagtgaggcaattccagggccacacagacggagccagctgtattgacatttctaatgatggcaccaagctctggacgggtggtttggacaacacagtcaggtcctgggacctgcgcgaggggcggcagctgcagcagcacgacttcacctcccagatcttctccctggggtactgccccaccggggagtggctggcagtgggcatggagagcagcaatgtggaggtgctgcacgtgaacaagcctgacaagtaccagctgcacctgcatgagagctgcgtgctgtccctgaaatttgcttactgtggtaaatggtttgtgagtactggaaaagataacctcctcaatgcttggcggaccccctatggagccagcatattccagtccaaagagtcctcgtcagtgcttagctgtgacatctctgtggatgataagtacatagtcactggctcgggggacaagaaggctacagtctatgaagtcatctactgaaaacattatgtggtttaacgtttatagttgaattgggccaaaatgtttcgaatttatagaaatagaaaagttgtaactttaaaagagaaaaaaaattacaaacacctgtttccaaaccttgacagaaaactactttgagtctacaaagaggaggcgacaagtccatcagcagaaagtcacctgtctacatagaccaaatggagcaccaaggccaagcggacagaggggccatgggttgtaggattgaggaacggaatctgccgactcacatgacagcccattctttctttctgggtgatctggggatcacgccttgcccaagtgtgagattacctttctgttccttgcagttcacctcactttccgtcctttgtagagcagtggtgtctccaatgaacttgtttcctggttttgcatcttgtgaaatgtttttttgtatttttgttgaaggttaaacatttgtataaattgtaaatatatttggtttattacagtaaaggctttagtaccaataaaaaaaaaaaaaaaa

SEQ ID NO: 2370 - protein, 770 aa, Homo sapien
MFPQSRHPTPHQAAGQPFKFTIPESLDRIKEEFQFLQAQYHSLKLECEKLASEKTEMQRHYVMYYEMSYGLNIEMHKQTEIAKRLNTICAQVIPFLSQEHQQQVAQAVERAKQVTMAELNAIIGQQQLQAQHLSHGHGPPVPLTPHPSGLQPPGIPPLGGSAGLLALSSALSGQSHLAIKDDKKHHDAEHHRDREPGTSNSLLVPDSLRGTDKRRNGPEFSNDIKKRKVDDKDSSHYDSDGDKSDDNLVVDVSNEDPSSPRASPAHSPRENGIDKNRLLKKDASSSPASTASSASSTSLKSKEMSLHEKASTPVLKSSTPTPRSDMPTPGTSATPGLRPGLGKPPAIDPLVNQAAAGLRTPLAVPGPYPAPFGMVPHAGMNGELTSPGAAYASLHNMSPQMSAAAAAAAVVAYGRSPMVGFDPPPHMRVPTIPPNLAGIPGGKPAYSFHVTADGQMQPVPFPPDALIGPGIPRHARQINTLNHGEVVCAVTISNPTRHVYTGGKGCVKVWDISHPGNKSPVSQLDCLNRDNYIRSCKLLPDGCTLIVGGEASTLSIWDLAAPTPRIKAELTSSAPACYALAISPDSKVCFSCCSDGNIAVWDLHNQTLVRQFQGHTDGASCIDISNDGTKLWTGGLDNTVRSWDLREGRQLQQHDFTSQIFSLGYCPTGEWLAVGMESSNVEVLHVNKPDKYQLHLHESCVLSLKFAYCGKWFVSTGKDNLLNAWRTPYGASIFQSKESSSVLSCDISVDDKYIVTGSGDKKATVYEVIY

SEQ ID NO: 2371 - DNA, 1976 bp, Homo sapien
gccacacggtctttgagctgagtcgaggtggaccctttgaacgcagtcgccctacagccgctgattccccccgcatcgcctcccgtggaagcccaggcccgcttcgcagctttctccctttgtctcataaccatgtccaccaacgagaatgctaatacaccagctgcccgtcttcacagattcaagaacaagggaaaagacagtacagaaatgaggcgtcgcagaatagaggtcaatgtggagctgaggaaagctaagaaggatgaccagatgctgaagaggagaaatgtaagctcatttcctgatgatgctacttctccgctgcaggaaaaccgcaacaaccagggcactgtaaattggtctgttgatgacattgtcaaaggcataaatagcagcaatgtggaaaatcagctccaagctactcaagctgccaggaaactactttccagagaaaaacagccccccatagacaacataatccgggctggtttgattccgaaatttgtgtccttcttgggcagaactgattgtagtcccattcagtttgaatctgcttgggcactcactaacattgcttctgggacatcagaacaaaccaaggctgtggtagatggaggtgccatcccagcattcatttctctgttggcatctccccatgctcacatcagtgaacaagctgtctgggctctaggaaacattgcaggtgatggctcagtgttccgagacttggttattaagtacggtgcagttgacccactgttggctctccttgcagttcctgatatgtcatctttagcatgtggctacttacgtaatcttacctggacactttctaatctttgccgcaacaagaatcctgcacccccgatagatgctgttgagcagattcttcctaccttagttcggctcctgcatcatgatgatccagaagtgttagcagatacctgctgggctatttcctaccttactgatggtccaaatgaacgaattggcatggtggtgaaaacaggagttgtgccccaacttgtgaagcttctaggagcttctgaattgccaattgtgactcctgccctaagagccatagggaatattgtcactggtacagatgaacagactcaggttgtgattgatgcaggagcactcgccgtctttcccagcctgctcaccaaccccaaaactaacattcagaaggaagctacgtggacaatgtcaaacatcacagccggccgccaggaccagatacagcaagttgtgaatcatggattagtcccattccttgtcagtgttctctctaaggcagattttaagacacaaaaggaagctgtgtgggccgtgaccaactataccagtggtggaacagttgaacagattgtgtaccttgttcactgtggcataatagaaccgttgatgaacctcttaactgcaaaagataccaagattattctggttatcctggatgccatttcaaatatctttcaggctgctgagaaactaggtgaaactgagaaacttagtataatgattgaagaatgtggaggcttagacaaaattgaagctctacaaaaccatgaaaatgagtctgtgtataaggcttcgttaagcttaattgagaagtatttctctgtagaggaagaggaagatcaaaacgttgtaccagaaactacctctgaaggctacactttccaagttcaggatggggctcctgggacctttaacttttagatcatgtagctgagacataaatttgttgtgtactacgtttggtattttgtcttattgtttctctactaagaactctttcttaaatgtggtttgttactgtagcactttttacactgaaactatacttgaacagttccaactgtacatacatactgtatgaagcttgtcctctgactaggtttctaatttctatgtggaatttcctatcttgcagcatcctgtaaataaacattcaagtccacccttaaaaaaaa

SEQ ID NO: 2372 - protein, 529 aa, Homo sapien [sequence omitted]

SEQ ID NO: 2373 - DNA, 1365 bp, Homo sapien
gtggagcccgggagttccagggcttgggaaggggaaggaaacctctctgaaatctgacacctgctctcccggcaaggaaacttcgcaggctgaccgaccaagaccatcactatgaccgatggagactatgattatctgatcaaactcctggccctcggggattcaggggtggggaagacaacatttctttatagatacacagataataaattcaatcccaaattcatcactacagtaggaatagactttcgggaaaaacgtgtggtttataatgcacaaggaccgaatggatcttcagggaaagcatttaaagtgcatcttcagctttgggacactgcgggacaagagcggttccggagtctcaccactgcatttttcagagacgccatgggcttcttattaatgtttgacctcaccagtcaacagagcttcttaaatgtcagaaactggatgagccaactgcaagcaaatgcttattgtgaaaatccagatatagtattaattggcaacaaggcagacctaccagatcagagggaagtcaatgaacggcaagctcgggaactggctgacaaatatggcataccatattttgaaacaagtgcagcaactggacagaatgtggagaaagctgtagaaacccttttggacttaatcatgaagcgaatggaacagtgtgtggagaagacacaaatccctgatactgtcaatggtggaaattctggaaacttggatggggaaaagccaccagagaagaaatgtatctgctagactctacatagaaactgaacatcaagaaccccaccaaaatattacttttaaaaacaatgacaaaccacacaattgttgttgagtaaaccacgcacaatggcatgtctttctttttctgccagaaaatctattttaagaaaccagaatagtcaacagtgttcaaaagaattgactagttatccctgaggccctttcaaacatgatcaaagatttcccaatgtgatctcatcatcatggatactcaatttgttttttcttatagagaaaatgagtatataagacaatatacaagaagaaatatcagtgagttttaaatcagaacaagttacctgtcacattgaagaaaagggtaggcactaaagggagaacacagaaagaagaatttctaaaatattggatttacttcttatattgagtcagatgcatacttttagatttgcattggggaaaatgtactagctaaaaatggatacacaatgaagaattctatttggctaattaagaatgatatactatgtacacccaataagctgtactagaatgaataaattactgataaggttccaaaaaaaaaaaaaaaaaaaaaaaaaaaaaaaa

SEQ ID NO: 2374 - protein, 218 aa, Homo sapien
MTDGDYDYLIKLLALGDSGVGKTTFLYRYTDNKFNPKFITTVGIDFREKRVVYNAQGPNGSSGKAFKVHLQLWDTAGQERFRSLTTAFFRDAMGFLLMFDLTSQQSFLNVRNWMSQLQANAYCENPDIVLIGNKADLPDQREVNERQARELADKYGIPYFETSAATGQNVEKAVETLLDLIMKRMEQCVEKTQIPDTVNGGNSGNLDGEKPPEKKCIC

SEQ ID NO: 2375 - DNA, 1654 bp, Homo sapien
atcaaacactgttatgcacataatgcagcactgtgatctaatttaaataatacttttttattatttatactactatatataatatacatcaacacttttgctatataacctaagtgataaccctcttttagttacctgccaaactctggacttggtttatattgcagttaacacagttacaaagctgtaatggtgtctttttttcctttgtaacggaatgtgtaaatcaaagtatatacattgtgtggtgttcctgtttctggagtttcatgaggatttacacatggcattcagtgttctgtatagatctgcctacctttgtgaattcatctgttaacccctcttcctttgagagagcaccggcgatggtggttaactccttgtgttttctctctctcctactggttattcttgaattaagcacagactcgtcagctcggttgctttatcatgaataatgtgtgtgaccttgcagttcttccacagttcagcaaacaagtgctagcttcactgaccaaaaattaaggaaggaaaacacagtttttaaaacgatccatcttttaacagccgaaaccgatgtgtctatggtgctgcaccttgctgttgtacttctgaaatcagacgtgtgtgaacgatcatttctgacttaaccgtgagatgctcacgagtacccttcctgttgttttgttagcattgaaatcgagactatttatttggaatatatacaacagtgtttttccactgtatttcatttgcaaaagttgagaactgctttctctaccttttgcaaaataattgatattccatattggattctcaaagacttcgatatggtgaacctattaaacctagaaattgtattcatcctttcatgactgtggcctgagttccccagcccctctcctccttttttttagatgagatttagcacactctcagttatttaaacatgcaacatttcttgagtatgtatgttgaggccatctgagctcatagctgattcagtaaccagtttcatgctgtgtcattcacactcactacttaatactgccatggtgaaaatgtggaggaaaaatgtatccatgtgtgtctgggaagcatatacacttgtacattttttaatactctgattctgtaacatttctgagttttgttttgttttacagaaaaaaaaaaaaaagtgataaagcaatcagaagaccaagaggtttactattgatgcttagggtcgtctgaccttggctggccaatagacctacacggccaaattaatttacgagagtaataatttttcaaaagccaattttttttctgtattttctgtatgaaactgccaatatcatgaatagaaagggagaaccataaaggagaaagaacgtgatgttctgttatgttcatgtaaacctaaagaaacagtgtggaggcaggcgcgatcagccgaactctagggacttggtgttgcttggaaggcatccatacctgcattttgcattcttcgtatgtaatcatattgccaaagacaaactatttcatcatttattgtaaataacacttttccccagacctaccataaagtttctgtgatgtattgtcttccagttgcaataaaaattactgagttgcatcaaaaaaaaaaaaaaaaaaaaaaaaaaaa

SEQ ID NO: 2376 - protein, 62 aa, Homo sapien
MRIYTWHSVFCIDLPTFVNSSVNPSSFERAPAMVVNSLCFLSLLLVILELSTDSSARLLYHE

SEQ ID NO: 2377 - DNA, 2748 bp, Homo sapien
agcgggtgcggggcgggaccggcccggcctatatattgggttggcgccggcgccagctgagccgagcggtagctggtctggcgaggttttatacacctgaaagaagagaatgtcaagacgaagtagccgtttacaagctaagcagcagccccagcccagccagacggaatccccccaagaagcccagataatccaggccaagaagaggaaaactacccaggatgtcaaaaaaagaagagaggaggtcaccaagaaacatcagtatgaaattaggaattgttggccacctgtattatctggggggatcagtccttgcattatcattgaaacacctcacaaagaaataggaacaagtgatttctccagatttacaaattacagatttaaaaatctttttattaatccttcacctttgcctgatttaagctggggatgttcaaaagaagtctggctaaacatgttaaaaaaggagagcagatatgttcatgacaaacattttgaagttctgcattctgacttggaaccacagatgaggtccatacttctagactggcttttagaggtatgtgaagtatacacacttcatagggaaacattttatcttgcacaagacttttttgatagatttatgttgacacaaaaggatataaataaaaatatgcttcaactcattggaattacctcattattcattgcttccaaacttgaggaaatctatgctcctaaactccaagagtttgcttacgtcactgatggtgcttgcagtgaagaggatatcttaaggatggaactcattatattaaaggctttaaaatgggaactttgtcctgtaacaatcatctcctggctaaatctctttctccaagttgatgctcttaaagatgctcctaaagttcttctacctcagtattctcaggaaacattcattcaaatagctcagcttttagatctgtgtattctagccattgattcattagagttccagtacagaatactgactgctgctgccttgtgccattttacctccattgaagtggttaagaaagcctcaggtttggagtgggacagtatttcagaatgtgtagattggatggtaccttttgtcaatgtagtaaaaagtactagtccagtgaagctgaagacttttaagaagattcctatggaagacagacataatatccagacacatacaaactatttggctatgctggaggaagtaaattacataaacaccttcagaaaagggggacagttgtcaccagtgtgcaatggaggcattatgacaccaccgaagagcactgaaaaaccaccaggaaaacactaaagaagataactaagcaaacaagttggaattcaccaagattgggtagaactggtatcactgaactactaaagttttacagaaagtagtgctgtgattgattgccctagccaattcacaagttacactgccattctgattttaaaacttacaattggcactaaagaatacatttaattatttcctatgttagctgttaaagaaacagcaggacttgtttacaaagatgtcttcattcccaaggttactggatagaagccaaccacagtctataccatagcaatgtttttcctttaatccagtgttactgtgtttatcttgataaactaggaattttgtcactggagttttggactggataagtgctaccttaaagggtatactaagtgatacagtactttgaatctagttgttagattctcaaaattcctacactcttgactagtgcaatttggttcttgaaaattaaatttaaacttgtttacaaaggtttagttttgtaataaggtgactaatttatctatagctgctatagcaagctattataaaacttgaatttctacaaatggtgaaatttaatgttttttaaactagtttatttgccttgccataacacattttttaactaataaggcttagatgaacatggtgttcaacctgtgctctaaacagtgggagtaccaaagaaattataaacaagataaatgctgtggctccttcctaactggggctttcttgacatgtaggttgcttggtaataacctttttgtatatcacaatttgggtgaaaaacttaagtaccctttcaaactatttatatgaggaagtcactttactactctaagatatccctaaggaatttttttttttaatttagtgtgactaaggctttatttatgtttgtgaaactgttaaggtcctttctaaattcctccattgtgagataaggacagtgtcaaagtgataaagcttaacacttgacctaaacttctattttcttaaggaagaagagtattaaatatatactgactcctagaaatctatttattaaaaaaagacatgaaaacttgctgtacataggctagctatttctaaatattttaaattagcttttctaaaaaaaaaatccagcctcataaagtagattagaaaactagattgctagtttattttgttatcagatatgtgaatctcttctccctttgaagaaactatacatttattgttacggtatgaagtcttctgtatagtttgtttttaaactaatatttgtttcagtattttgtctgaaaagaaaacaccactaattgtgtacatatgtattatataaacttaaccttttaatactgtttatttttagcccattgtttaaaaaataaaagttaaaaaaatttaactgcttaaaagtaaaaaaaaaaaaaaaaaaa

SEQ ID NO: 2378 - protein, 404 aa, Homo sapien
MSRRSSRLQAKQQPQPSQTESPQEAQIIQAKKRKTTQDVKKRREEVTKKHQYEIRNCWPPVLSGGISPCIIIETPHKEIGTSDFSRFTNYRFKNLFINPSPLPDLSWGCSKEVWLNMLKKESRYVHDKHFEVLHSDLEPQMRSILLDWLLEVCEVYTLHRETFYLAQDFFDRFMLTQKDINKNMLQLIGITSLFIASKLEEIYAPKLQEFAYVTDGACSEEDILRMELIILKALKWELCPVTIISWLNLFLQVDALKDAPKVLLPQYSQETFIQIAQLLDLCILAIDSLEFQYRILTAAALCHFTSIEVVKKASGLEWDSISECVDWMVPFVNVVKSTSPVKLKTFKKIPMEDRHNIQTHTNYLAMLEEVNYINTFRKGGQLSPVCNGGIMTPPKSTEKPPGKH

SEQ ID NO: 2379 - DNA, 719 bp, Homo sapien
gaattctggaagttcattgaagagtctgaaattagggacttatttcaaatttggacatggctagtcgaggcgcaacaagacccaacggcccaaatactggaaataaaatatgccagttcaaactagtacttctgggagagtccgctgttggcaaatcaagcctagtgcttcgttttgtgaaaggccaatttcatgaatttcaagagagtaccattggggctgcttttctaacccaaactgtatgtcttgatgacactacagtaaagtttgaaatctgggatacagctggtcaagaaggataccatagcctagcaccaatgtactacagaggagcacaagcagccatagttgtatatgatatcacaaatgaggagtcctttgcaagagcaaaaaattgggttaaagaacttcagaggcaagcaagtcctaacattgtaatagctttatcgggaaacaaggccgacctagcaaataaaagagcagtagatttccaggaagcacagtcctatgcagatgacaatagtttattattcatggagacatccgctaaaacatcaatgaatgtaaatgaaatattcatggcaatagctaaaaaattgccaaagaatgaaccacaaaatccaggagcaaattctgccagaggaggaggagtagaccttaccgaacccacacaaccaaccaggaatcagtgttgtagtaactaaacctctagtttgaac

SEQ ID NO: 2380 - protein, 215 aa, Homo sapien
MASRGATRPNGPNTGNKICQFKLVLLGESAVGKSSLVLRFVKGQFHEFQESTIGAAFLTQTVCLDDTTVKFEIWDTAGQEGYHSLAPMYYRGAQAAIVVYDITNEESFARAKNWVKELQRQASPNIVIALSGNKADLANKRAVDFQEAQSYADDNSLLFMETSAKTSMNVNEIFMAIAKKLPKNEPQNPGANSARGGGVDLTEPTQPTRNQCCSN

SEQ ID NO: 2381 - DNA, 1271 bp, Homo sapien
cagcgtggaggctccaaggaccaagtcctgcgcctctttggcggggtgtgtgcaggaggaggggggataaataggaggctccctcctcccggcgacattcacggagccggccggcctcccgccctgggtgtttccctgccttgtagccagggtgccagcctgggaagtagtttcgtttccttctgcctccgggattagtttccaggcaccctctcaggcgcccgaggcccgggaagggggcgaagaaggagggagacttgtctaggggctgcccggcccggcagagcggggttgatggaccgggccgcccggtgcagcggcgccagctccctgccactgctcctggcccttgccctgggtctagtgatccttcactgtgtggtggcagatgggaattccaccagaagtcctgaaactaatggcctcctctgtggagaccctgaggaaaactgtgcagctaccaccacacaatcaaagcggaaaggccacttctctaggtgccccaagcaatacaagcattactgcatcaaagggagatgccgcttcgtggtggccgagcagacgccctcctgtgtctgtgatgaaggctacattggagcaaggtgtgagagagttgacttgttttacctaagaggagacagaggacagattctggtgatttgtttgatagcagttatggtagtttttattattttggtcatcggtgtctgcacatgctgtcaccctcttcggaaacgtcgtaaaagaaagaagaaagaagaagaaatggaaactctgggtaaagatataactcctatcaatgaagatattgaagagacaaatattgcttaaaaggctatgaagttacctccaggttggtggcaagctgcaaagtgccttgctcatttgaaaatggacagaatgtgtctcaggaaaaacagctagtagacatgaattttaaataatgtatttactttttatttgcaactttagtttgtgttattattttttaataagaacattaattatatgtatattgtctagtaattgggaaaaaagcaactggttaggtagcaacaacagaagggaaatttcaataacctttcacttaagtattgtcaccaggattactagtcaaacaaaaaagaaaagtagaaaggaggttaggtcttaggaattgaattaataataaagctaccatttatcaagcatttaccatgtgctaataagtttgaaatatattatttcctttattcctttcagcaatccatgagatagctattataatcctc

SEQ ID NO: 2382 - protein, 178 aa, Homo sapien
MDRAARCSGASSLPLLLALALGLVILHCVVADGNSTRSPETNGLLCGDPEENCAATTTQSKRKGHFSRCPKQYKHYCIKGRCRFVVAEQTPSCVCDEGYIGARCERVDLFYLRGDRGQILVICLIAVMVVFIILVIGVCTCCHPLRKRRKRKKKEEEMETLGKDITPINEDIEETNIA

SEQ ID NO: 2383 - DNA, 2209 bp, Homo sapien
ctaaatgaagagcgcttgggacctgaacaaccagcagcgatacccaggtacaaaggacctccagaccagagccagccagcagcaaaaagagcatggagctgaggagtacagcagcccccagagctgagggctacagcaacgtgggcttccagaatgaagaaaactttcttgagaacgagaacacatcaggaaacaactcaataagaagcagagctgtgcaaagcagggagcacacaaacaccaaacaggatgaagaacaggtcacagttgagcaggattctccaagaaacagagaacacatggaggatgatgatgaggagatgcaacaaaaagggtgtttggaaaggaggtatgacacagtatgtggtttctgtaggaaacacaaaacaactcttcggcacatcatctggggcattttattagcaggttatctggttatggtgatttcggcctgtgtgctgaactttcacagagcccttcctctttttgtgatcaccgtggctgccatcttctttgttgtctgggatcacctgatggccaaatacgaacatcgaattgatgagatgctgtctcctggcagaaggcttctaaacagccattggttctggctgaagtgggtgatctggagctccctggtcctagcagttattttctggttggcctttgacactgccaaattgggtcaacagcagctggtgtccttcggtgggctcataatgtacattgtcctgttatttctattttccaagtacccaaccagagtttactggagacctgtcttatggggaatcgggctacagtttcttcttgggctcttgattctaaggactgaccctggatttatagcttttgattggttgggcagacaagttcagacttttctggagtacacagatgctggtgcttcatttgtctttggtgagaaatacaaagaccacttctttgcatttaaggtcctgccgatcgtggttttcttcagcactgtgatgtccatgctgtactacctgggactgatgcagtggattattagaaaggttggatggatcatgctagttactacgggatcatctcctattgaatctgtagttgcttctggcaatatatttgttggacaaacggagtctccactgctggtccgaccatatttaccttacatcaccaagtctgaactccacgccatcatgaccgccgggttctctaccattgctggaagcgtgctaggtgcatacatttcttttggggttccatcctcccacttgttaacagcgtcagttatgtcagcacctgcgtcattggctgctgctaaactcttttggcctgagacagaaaaacctaaaataaccctcaagaatgccatgaaaatggaaagtggtgattcagggaatcttctagaagctgcaacacagggagcatcctcctccatctccctggtggccaacatcgctgtgaatctgattgccttcctggccctgctgtcttttatgaattcagccctgtcctggtttggaaacatgtttgactacccacagctgagttttgagctaatctgctcctacatcttcatgcccttttccttcatgatgggagtggaatggcaggacagctttatggttgccagactcataggttataagaccttcttcaatgaatttgtggcttatgagcacctctcaaaatggatccacttgaggaaagaaggtggacccaaatttgtaaacggtgtgcagcaatatatatcaattcgttctgagataatcgccacttacgctctctgtggttttgccaatatcgggtccctaggaatcgtgatcggcggactcacatccatggctccttccagaaagcgtgatatcgcctcgggggcagtgagagctctgattgcggggaccgtggcctgcttcatgacagcctgcatcgcaggcatactctccagcactcctgtggacatcaactgccatcacgttttagagaatgccttcaactccactttccctggaaacacaaccaaggtgatagcttgttgccaaagtctgttgagcagcactgttgccaagggtcctggtgaagtcatcccaggaggaaaccacagtctgtattctttgaagggctgctgcacattgttgaatccatcgacctttaactgcaatgggatctctaatacattttgaggtcagccacttctccagtggaactctgaagtacagatgct

SEQ ID NO: 2384 - protein, 691 aa, Homo sapien
MELRSTAAPRAEGYSNVGFQNEENFLENENTSGNNSIRSRAVQSREHTNTKQDEEQVTVEQDSPRNREHMEDDDEEMQQKGCLERRYDTVCGFCRKHKTTLRHIIWGILLAGYLVMVISACVLNFHRALPLFVITVAAIFFVVWDHLMAKYEHRIDEMLSPGRRLLNSHWFWLKWVIWSSLVLAVIFWLAFDTAKLGQQQLVSFGGLIMYIVLLFLFSKYPTRVYWRPVLWGIGLQFLLGLLILRTDPGFIAFDWLGRQVQTFLEYTDAGASFVFGEKYKDHFFAFKVLPIVVFFSTVMSMLYYLGLMQWIIRKVGWIMLVTTGSSPIESVVASGNIFVGQTESPLLVRPYLPYITKSELHAIMTAGFSTIAGSVLGAYISFGVPSSHLLTASVMSAPASLAAAKLFWPETEKPKITLKNAMKMESGDSGNLLEAATQGASSSISLVANIAVNLIAFLALLSFMNSALSWFGNMFDYPQLSFELICSYIFMPFSFMMGVEWQDSFMVARLIGYKTFFNEFVAYEHLSKWIHLRKEGGPKFVNGVQQYISIRSEIIATYALCGFANIGSLGIVIGGLTSMAPSRKRDIASGAVRALIAGTVACFMTACIAGILSSTPVDINCHHVLENAFNSTFPGNTTKVIACCQSLLSSTVAKGPGEVIPGGNHSLYSLKGCCTLLNPSTFNCNGISNTF

SEQ ID NO: 2385 - DNA, 2230 bp, Homo sapien
gcagcccactcttcccgagaggccccgacatctcccggataatctggagctttcaaaatgtttgccaaagcaaccaggaattttcttagagaagttgatgctgatggtgacctgattgcagtatcaaatctgaatgactctgataagttacagcttctaagtctggtgacaaaaaagaagagattctggtgctggcagagacccaagtaccagtttttatccctcacccttggcgatgtactcatagaagaccaatttccgagtccagtggtcgtggagtcggactttgtgaaatacgagggcaagtttgcaaaccacgtgagtggaaccctggagactgcactggggaaggtcaagctgaacctggggggcagcagccgcgtagagagccagtcttcatttggaaccctgaggaagcaggaggtggatttgcagcagctcatcagagactctgccgagagaacaataaatctgagaaaccctgtgctccagcaggtgctggaaggaaggaatgaggtcctgtgcgttttgacacagaagatcacgacgatgcagaagtgtgtgatctctgagcacatgcaggtcgaggagaagtgtggtggcatcgtgggcatccagaccaagacggtgcaggtgtcagcgacggaggatgggaatgtcaccaaggactccaacgtggtgctggagatcccagctgccaccaccattgcctacggtgtcattgagttatacgtgaaactggacggccagttcgagttctgccttctccgagggaagcaaggtggcttcgagaacaagaagagaattgactctgtctacctggaccccctggtctttcgagagtttgcattcatagacatgccagatgctgcgcatgggatatcttcccaggatggaccattaagtgttttaaagcaagcgaccctgctcctggagaggaatttccatccatttgcggagctgcctgagccacaacagacagctttgagtgacatcttccaggcggtcctatttgatgatgaactactcatggtcctggaaccagtgtgcgatgacctggtcagcggcctctcgcccacagtggcggtgctgggggagctgaagccccggcagcagcaggaccttgtggccttcctgcagctggtggggtgcagcttacagggtgggtgtccgggccccgaggatgcaggcagcaagcagctgtttatgacagcctacttcttggtcagtgccctcgcagaaatgccagatagcgcggcagctctgctgggcacttgctgcaaactccagatcattcccacactgtgccacttgcttcgtgctctgtctgatgatggagtatctgatcttgaagacccaaccttgactcccctgaaagatacagaaaggtttgggattgtgcagcgcttgtttgcctcagctgacattagtctggagagactgaagtcatctgtgaaagctgtcattctgaaggactctaaagtcttcccactgcttctttgtataaccctgaatggactctgtgctttaggcagagaacattcatgatgtcatatgtgaactagaagtacgtgttactggccaaggctatttttcagaactgttaaaggtcatatgcacgttaaaagttgaccaatgaaatgaatttacagaacagtttaagaagtggtgacattttgcatgatgaatgacctgacttttagccaccaggtactctttaaacagttttccttatcagaggccctcctgtgctggtgacccagcatctgagttaggttccagcatgtaaagagctgggagggcggagaattcttagcatacattcagacgttttttctgcacaataataagtccatctgtcacttgcattccactttttgttacatagaaagagtctgaccctttaatccaaaaggtctttttacattgtgaatgctgtgggaaggcaatttctctgcacacaagaggctacgttttggaagtgatgtatgttatttgatgactgaaaatgaactgtaaatgctcctagagtatattcctctgctgaacaaaattaaacttcaaaaaaatctaacagtaacacacccctgcttgggaccctagctatatgcattttatgtgaccttgccatgcttcagtgaacatactaattctatgtctagcacatgttgatttcctatgtattctgggtattctattaaaggaaactttgaactattaaaaaaaaaaa

SEQ ID NO: 2386 - protein, 496 aa, Homo sapien
MFAKATRNFLREVDADGDLIAVSNLNDSDKLQLLSLVTKKKRFWCWQRPKYQFLSLTLGDVLIEDQFPSPVVVESDFVKYEGKFANHVSGTLETALGKVKLNLGGSSRVESQSSFGTLRKQEVDLQQLIRDSAERTINLRNPVLQQVLEGRNEVLCVLTQKITTMQKCVISEHMQVEEKCGGIVGIQTKTVQVSATEDGNVTKDSNVVLEIPAATTIAYGVIELYVKLDGQFEFCLLRGKQGGFENKKRIDSVYLDPLVFREFAFIDMPDAAHGISSQDGPLSVLKQATLLLERNFHPFAELPEPQQTALSDIFQAVLFDDELLMVLEPVCDDLVSGLSPTVAVLGELKPRQQQDLVAFLQLVGCSLQGGCPGPEDAGSKQLFMTAYFLVSALAEMPDSAAALLGTCCKLQIIPTLCHLLRALSDDGVSDLEDPTLTPLKDTERFGIVQRLFASADISLERLKSSVKAVILKDSKVFPLLLCITLNGLCALGREHS

SEQ ID NO: 2387 - DNA, 1892 bp, Homo sapien
gaggctcaggaaaaagatgaactggtcccattcctgcatctccttttgctggatctactttgctgcttccagactgagagctgcagagacggcagatggaaaatatgctcagaagttgtttaatgacctttttgaagattattctaatgctcttcgtccagtggaagatacagataaagtcctgaatgtgaccctgcagattacgctctctcagattaaggatatggatgaaagaaaccaaattctgactgcttatttgtggatccgccaaatctggcacgatgcctatctcacgtgggaccgagatcagtacgatggcctagactccatcaggatccccagtgacctcgtgtggaggccagacatcgtcttatataacaaggctgatgatgaatcttcagagcctgtgaacaccaatgtggtcctgcggtatgatgggctgatcacctgggatgcaccggccatcaccaaaagctcctgtgtggtggatgtcacctacttcccttttgacaaccagcagtgcaacctgacttttggttcctggacctacaatggcaatcaggtggacatattcaacgccttggacagcggagatctctctgacttcattgaagatgtggaatgggaggtccatggcatgcccgctgtgaagaatgtgatctcctatggctgctgctctgagccttacccggatgtcacattcaccctccttctgaagaggaggtcctcgttctatatcgtcaacctcctcatcccatgcgtcctcatatcttttctggctcctctgagtttttatctcccagcagcctccggagaaaaggtctccctgggagtgaccatcctgttggccatgactgtatttcagctaatggtggcagaaatcatgccggcctcagaaaatgtgcccctgataggtaaatactacatagccacgatggccctgatcacagcctccactgcgttgaccatcatggtgatgaatatccacttctgtggggccgaggcccggccggtgccacactgggccagggtggtcatcctgaaatacatgtccagggtcttgtttgtctatgatgtgggtgaaagctgcctcagcccgcaccacagtagagagcgggaccacctcacgaaagtttatagcaaactcccagagtctaacctgaaagcagccaggaacaaagacctttccagaaagaaggacatgaacaaacgcttaaagaacgacctgggctgccagggtaagaaccctcaggaggccgagagttactgtgcacagtacaaagtgctgacgaggaatattgagtacatcgccaagtgcctcaaagaccacaaggccaccagttccaaggggagtgaatggaagaaggtggcgaaagtcatagaccgattcttcatgtggatttttttcattatggtgtttgtgatgactattttgatcatagcaagagcggattagtcacagatattggctttgctatctgggtagaaattaatacaattccctgtgatctattccaatgttcttccaagatttttgttcatctataatttaggggttatgttgtctgtgctttttatttttagcttcaaatgaatgtcgaagctatctgctctgttaaattaagcagaagatccaaaatttcaagggtaggaagatggaagaaatagggaaagagcccttttatagcccaccgtagtggtgggtgactggcctctagtttatataattatttacctctttggcagtacagataacaaaatacactttactggtaaaatttaaaacaaaaaaggcaaaacaaaacaaactcattttccccttagttcccattaaaatatgcatttgaaaaatgaaatagtcatatatatattagtgtgatttaagtctcaat

SEQ ID NO: 2388 - protein, 479 aa, Homo sapien
MNWSHSCISFCWIYFAASRLRAAETADGKYAQKLFNDLFEDYSNALRPVEDTDKVLNVTLQITLSQIKDMDERNQILTAYLWIRQIWHDAYLTWDRDQYDGLDSIRIPSDLVWRPDIVLYNKADDESSEPVNTNVVLRYDGLITWDAPAITKSSCVVDVTYFPFDNQQCNLTFGSWTYNGNQVDIFNALDSGDLSDFIEDVEWEVHGMPAVKNVISYGCCSEPYPDVTFTLLLKRRSSFYIVNLLIPCVLISFLAPLSFYLPAASGEKVSLGVTILLAMTVFQLMVAEIMPASENVPLIGKYYIATMALITASTALTIMVMNIHFCGAEARPVPHWARVVILKYMSRVLFVYDVGESCLSPHHSRERDHLTKVYSKLPESNLKAARNKDLSRKKDMNKRLKNDLGCQGKNPQEAESYCAQYKVLTRNIEYIAKCLKDHKATSSKGSEWKKVAKVIDRFFMWIFFIMVFVMTILIIARAD

SEQ ID NO: 2389 - DNA, 523 bp, Homo sapien
caaatccatagggagctctgccttaccattgggttcctaattaactgagtgagtgggtgtgttctgcatggtgagaggcattggaatgatgcatcagaaaacatgtcataatgtcatcactgtaatatgacaagaattgcagctgtggctggaacctttataaagtgaccaagcacaccttttcatccagtctcagcgtggggtgaagcctagcagctatgaggatccattatcttctgtttgctttgctcttcctgtttttggtgcctgttccaggtcatggaggaatcataaacacattacagaaatattattgcagagtcagaggcggccggtgtgctgtgctcagctgccttccaaaggaggaacagatcggcaagtgctcgacgcgtggccgaaaatgctgccgaagaaagaaataaaaaccctgaaacatgacgagagtgttgtaaagtgtggaaatgccttcttaaagtttataaaagtaaaatcaaattacatttttttttcaaaaaaaaaaaaa

SEQ ID NO: 2390 - protein, 67 aa, Homo sapien
MRIHYLLFALLFLFLVPVPGHGGIINTLQKYYCRVRGGRCAVLSCLPKEEQIGKCSTRGRKCCRRKK

SEQ ID NO: 2391 - DNA, 451 bp, Homo sapien
acttccctgttcactttggttccagcatcctgtccagcaaagaagcaatcagccaaaatgatacctggaggcttatctgaggccaaacccgccactccagaaatccaggagattgttgataaggttaaaccacagcttgaagaaaaaacaaatgagacttatggaaaattggaagctgtgcagtataaaactcaagttgttgctggaacaaattactacattaaggtacgagcaggtgataataaatatatgcacttgaaagtattcaaaagtcttcccggacaaaatgaggacttggtacttactggataccaggttgacaaaaacaaggatgacgagctgacgggcttttagcagcatgtacccaaagtgttctgattccttcaactggctactgagtcatgatccttgctgataaatataaccatcaataaagaagcattcttttcca

SEQ ID NO: 2392 - protein, 98 aa, Homo sapien
MIPGGLSEAKPATPEIQEIVDKVKPQLEEKTNETYGKLEAVQYKTQVVAGTNYYIKVRAGDNKYMHLKVFKSLPGQNEDLVLTGYQVDKNKDDELTGF

SEQ ID NO: 2393 - DNA, 2060 bp, Homo sapien
tgttcccagcactcaagccttgccaccgccgagccgggcttcctgggtgtttcaggcaaggaagtctaggtccctggggggtgacccccaaggaaaaggcagcctccctgcgcacccggttgcccggagccctctccagggccggctgggctgggggttgccctggccagcaggggcccgggggcgatgccacccggtgccgactgaggccaccgcaccatggcccgctcgctgacctggcgctgctgcccctggtgcctgacggaggatgagaaggccgccgcccgggtggaccaggagatcaacaggatcctcttggagcagaagaagcaggaccgcggggagctgaagctgctgcttttgggcccaggcgagagcgggaagagcaccttcatcaagcagatgcggatcatccacggcgccggctactcggaggaggagcgcaagggcttccggcccctggtctaccagaacatcttcgtgtccatgcgggccatgatcgaggccatggagcggctgcagattccattcagcaggcccgagagcaagcaccacgctagcctggtcatgagccaggacccctataaagtgaccacgtttgagaagcgctacgctgcggccatgcagtggctgtggagggatgccggcatccgggcctgctatgagcgtcggcgggaattccacctgctcgattcagccgtgtactacctgtcccacctggagcgcatcaccgaggagggctacgtccccacagctcaggacgtgctccgcagccgcatgcccaccactggcatcaacgagtactgcttctccgtgcagaaaaccaacctgcggatcgtggacgtcgggggccagaagtcagagcgtaagaaatggatccattgtttcgagaacgtgatcgccctcatctacctggcctcactgagtgaatacgaccagtgcctggaggagaacaaccaggagaaccgcatgaaggagagcctcgcattgtttgggactatcctggaactaccctggttcaaaagcacatccgtcatcctctttctcaacaaaaccgacatcctggaggagaaaatccccacctcccacctggctacctatttccccagtttccagggccctaagcaggatgctgaggcagccaagaggttcatcctggacatgtacacgaggatgtacaccgggtgcgtggacggccccgagggcagcaagaagggcgcacgatcccgacgccttttcagccactacacatgtgccacagacacacagaacatccgcaaggtcttcaaggacgtgcgggactcggtgctcgcccgctacctggacgagatcaacctgctgtgacccaggccccacctggggcaggcggcaccggcgggcgggtgggaggtgggagtggctgcagggaccctagtgtcctggtctatctctccagcctcggcccacacgcaagggagtcgggggacggcccgctgctggccgctctcttctctgcctctcaccaggacagccgccccccagggtactcctgcccttgcttgactcagtttccctcctttgaaagggaaggagcaaaacggccatttgggatgccagggtggatgaaaaggtgaagaaatcaggggattgagacttgggtgggtgggcatctctcaggagccccatctccgggcgtgtcacctcctgggcagggttctgggaccctctgtgggtgacgcacaccctgggatggggctagtagagccttcaggcgccttcgggcgtggactctggcgcactctagtggacaggagaaggaacgccttccaggaacctgtggactaggggtgcagggacttccctttgcaaggggtaacagaccgctggaaaacactgtcactttcagagctcggtggctcacagcgtgtcctgccccggtttgcggacgagagaaatcgcggcccacaagcatcccccatcccttgcaggctgggggctgggcatgctgcatcttaaccttttgtatttattccctcaccttctgcagggctccgtgcgggctgaaattaaagatttcttag

SEQ ID NO: 2394 - protein, 374 aa, Homo sapien
MARSLTWRCCPWCLTEDEKAAARVDQEINRILLEQKKQDRGELKLLLLGPGESGKSTFIKQMRIIHGAGYSEEERKGFRPLVYQNIFVSMRAMIEAMERLQIPFSRPESKHHASLVMSQDPYKVTTFEKRYAAAMQWLWRDAGIRACYERRREFHLLDSAVYYLSHLERITEEGYVPTAQDVLRSRMPTTGINEYCFSVQKTNLRIVDVGGQKSERKKWIHCFENVIALIYLASLSEYDQCLEENNQENRMKESLALFGTILELPWFKSTSVILFLNKTDILEEKIPTSHLATYFPSFQGPKQDAEAAKRFILDMYTRMYTGCVDGPEGSKKGARSRRLFSHYTCATDTQNIRKVFKDVRDSVLARYLDEINLL

SEQ ID NO: 2395 - DNA, 1390 bp, Homo sapien
ccgatggcgtccgcctcaggggccatggcgaagcacgagcagatcctggtcctcgatccgcccacagacctcaaattcaaaggccccttcacagatgtagtcactacaaatcttaaattgcgaaatccatcggatagaaaagtgtgtttcaaagtgaagactacagcacctcgccggtactgtgtgaggcccaacagtggaattattgacccagggtcaactgtgactgtttcagtaatgctacagccctttgactatgatccgaatgaaaagagtaaacacaagtttatggtacagacaatttttgctccaccaaacacttcagatatggaagctgtgtggaaagaggcaaaacctgatgaattaatggattccaaattgagatgcgtatttgaaatgcccaatgaaaatgataaattgaatgatatggaacctagcaaagctgttccactgaatgcatctaagcaagatggacctatgccaaaaccacacagtgtttcacttaatgataccgaaacaaggaaactaatggaagagtgtaaaagacttcagggagaaatgatgaagctatcagaagaaaatcggcacctgagagatgaaggcttaaggctcagaaaggtagcacattcggataaacctggatcaacctcaactgcatccttcagagataatgtcaccagtcctcttccttcacttcttgttgtaattgcagccattttcattggattctttctagggaaattcatcttgtagagtgaagcatgcagagtgctgtttctttttttttttctcttgaccagaaaaagatttgtttacctaccatttcattggtagtatggcccacggtgaccatttttttgtgtgtacagcgtcatataggctttgcctttaatgatctcttacggttagaaaacacaataaaaacaaactgttcggctactggacaggttgtatattaccagatcatcactagcagatgtcagttgcacattgagtcctttatgaaattcataaataaagaattgttctttgtttgtggttttaataagagttcaagaattgttcagagtcttgtaaatgttattttaataatccctttaaattttatctgttgctgttacctcttgaaatatgatttatttagattgctaatcccactcattcaggaaatgccaagaggtattccttggggaaatggtgcctcttacagtgtaaatttttcctcctttacctttgtaatatcatggcagaatttttcttatcccttgtgaggcagttgttgaatgagtttttcatccttacaatcctgtcccatggtatttaacataaaaaaaaataaaactgttaacagattcttgctcgataaaaaaaaaaaaaaaaaaaaaaaaaa

SEQ ID NO: 2396 - protein, 242 aa, Homo sapien
MAKHEQILVLDPPTDLKFKGPFTDVVTTNLKLRNPSDRKVCFKVKTTAPRRYCVRPNSGIIDPGSTVTVSVMLQPFDYDPNEKSKHKFMVQTIFAPPNTSDMEAVWKEAKPDELMDSKLRCVFEMPNENDKLNDMEPSKAVPLNASKQDGPMPKPHSVSLNDTETRKLMEECKRLQGEMMKLSEENRHLRDEGLRLRKVAHSDKPGSTSTASFRDNVTSPLPSLLVVIAAIFIGFFLGKFIL

SEQ ID NO: 2397 - DNA, 1919 bp, Homo sapien
ctgaagaacaaatcagcctggtcaccagcttttcggaacagcagagacacagagggcagtcatgagtgaggtcaccaagaattccctggagaaaatccttccacagctgaaatgccatttcacctggaacttattcaaggaagacagtgtctcaagggatctagaagatagagtgtgtaaccagattgaatttttaaacactgagttcaaagctacaatgtacaacttgttggcctacataaaacacctagatggtaacaacgaggcagccctggaatgcttacggcaagctgaagagttaatccagcaagaacatgctgaccaagcagaaatcagaagtctagtcacttggggaaactacgcctgggtctactatcacttgggcagactctcagatgctcagatttatgtagataaggtgaaacaaacctgcaagaaattttcaaatccatacagtattgagtattctgaacttgactgtgaggaagggtggacacaactgaagtgtggaagaaatgaaagggcgaaggtgtgttttgagaaggctctggaagaaaagcccaacaacccagaattctcctctggactggcaattgcgatgtaccatctggataatcacccagagaaacagttctctactgatgttttgaagcaggccattgagctgagtcctgataaccaatacgtcaaggttctcttgggcctgaaactgcagaagatgaataaagaagctgaaggagagcagtttgttgaagaagccttggaaaagtctccttgccaaacagatgtcctccgcagtgcagccaaattttacagaagaaaaggtgacctagacaaagctattgaactgtttcaacgggtgttggaatccacaccaaacaatggctacctctatcaccagattgggtgctgctacaaggcaaaagtaagacaaatgcagaatacaggagaatctgaagctagtggaaataaagagatgattgaagcactaaagcaatatgctatggactattcgaataaagctcttgagaagggactgaatcctctgaatgcatactccgatctcgctgagttcctggagacggaatgttatcagacaccattcaataaggaagtccctgatgctgaaaagcaacaacaatcccatcagcgctactgcaaccttcagaaatataatgggaagtctgaagacactgctgtgcaacatggtttagagggtttgtccataagcaaaaaatcaactgacaaggaagagatcaaagaccaaccacagaatgtatctgaaaatctgcttccacaaaatgcaccaaattattggtatcttcaaggattaattcataagcagaatggagatctgctgcaagccaaatgttatgagaaggaactgggccgcctgctaagggatgccccttcaggcataggcagtattttcctgtcagcatctgagcttgaggatggtagtgaggaaatgggccagggcgcagtcagctccagtcccagagagctcctctctaactcagagcaactgaactgagacagaggaggaaaacagagcatcagaagcctgcagtggtggttgtgacgggtaggaggataggaagacagggggcccaacctgggattgctgagcagggaagctttgcatgttgctctaaggtacatttttaaagagttgttttttggccgggcgcagtgctcatgcctgtaatcccagaactttgggaggccgaggtgggcggatcacgaggtctggagtttgagaccatcctggctaacacagtgaaatcccgtctctactaaaaatacaaaaaattagccaggcgtggtggctggcacctgtagtcccagctacttgggaggctgaggcaggagaatggcgtgaacctggaaggaagaggttgcagagagccaagattgcg

SEQ ID NO: 2398 - protein, 490 aa, Homo sapien
MSEVTKNSLEKILPQLKCHFTWNLFKEDSVSRDLEDRVCNQIEFLNTEFKATMYNLLAYIKHLDGNNEAALECLRQAEELIQQEHADQAEIRSLVTWGNYAWVYYHLGRLSDAQIYVDKVKQTCKKFSNPYSIEYSELDCEEGWTQLKCGRNERAKVCFEKALEEKPNNPEFSSGLAIAMYHLDNHPEKQFSTDVLKQAIELSPDNQYVKVLLGLKLQKMNKEAEGEQFVEEALEKSPCQTDVLRSAAKFYRRKGDLDKAIELFQRVLESTPNNGYLYHQIGCCYKAKVRQMQNTGESEASGNKEMIEALKQYAMDYSNKALEKGLNPLNAYSDLAEFLETECYQTPFNKEVPDAEKQQQSHQRYCNLQKYNGKSEDTAVQHGLEGLSISKKSTDKEEIKDQPQNVSENLLPQNAPNYWYLQGLIHKQNGDLLQAKCYEKELGRLLRDAPSGIGSIFLSASELEDGSEEMGQGAVSSSPRELLSNSEQLN

SEQ ID NO: 2399 - DNA, 1610 bp, Homo sapien
ggcacgagggagagaactagtctcgagtttttttttttttttttttgacaagatggcggcaggaggcagtggcgttggtgggaagcgcagctcgaaaagcgatgccgattctggtttcctggggctgcggcccacttcggtggacccagcgctgaggcggcggcggcgaggcccaagaaataagaagcggggctggcggcggcttgctcaggagccgctggggctggaggttgaccagttcctggaagacgtgcggctacaggagcgcacgagcggtggcttgttgtcagaggccccaaatgaaaaactcttcttcgtggacactggctccaaggaaaaagggctgacaaagaagagaaccaaagtccagaagaagtcactgcttctcaagaaaccccttcgggttgacctcatcctcgagaacacatccaaagtccctgcccccaaagacgtcctcgcccaccaggtccccaacgccaagaagctcaggcggaaggagcagctatgggagaagctggccaagcagggcgagctgccccgggaggtgcgcagggcccaggcccggctcctcaacccttctgcaacaagggccaagcccgggccccaggacaccgtagagcggcccttctacgacctctgggcctcagacaaccccctggacaggccgttggttggccaggatgagtttttcctggagcagaccaagaagaaaggagtgaagcggccagcacgcctgcacaccaagccgtcccaggcgcccgccgtggaggtggcgcctgccggagcttcctacaatccatcctttgaagaccaccagaccctgctctcagcggcccacgaggtggagttgcagcggcagaaggaggcggagaagctggagcggcagctggccctgcccgccacggagcaggccgccacccaggagtccacattccaggagctgtgcgaggggctgctggaggagtcggatggtgagggggagccaggccagggcgaggggccggaggctggggatgccgaggtctgtcccacgcccgcccgcctggccaccacagagaagaagacggagcagcagcggcggcgggagaaggctgtgcacaggctgcgggtacagcaggccgcgttgcgggccgcccggctccggcaccaggagctgttccggctgcgcgggatcaaggcccaggtggccctgaggctggcggagctggcgcggcggcggaggcggcggcaggcgcggcgggaggctgaggctgacaagccccgaaggctgggacggctcaagtaccaggcacctgacatcgacgtgcagctgagctcggagctgacagactcgctcaggaccctgaagcccgagggcaacatccttcgagaccggttcaagagcttccagaggaggaatatgatcgagcctcgagagagagccaagttcaaacgcaagtacaaggtgaagctggtggagaagcgggcgttccgtgagatccagttgtagctgccatcagatgccggagactcgcccttcaataaaaaatctcttctagctgaaaaaaaaaaaaaaaaaaaaaaaaaaaaaaaaaaaaaaaaaaaaaaaaaaaaaaaaaaaaaaaaaaaaa

SEQ ID NO: 2400 - protein, 478 aa, Homo sapien
MAAGGSGVGGKRSSKSDADSGFLGLRPTSVDPALRRRRRGPRNKKRGWRRLAQEPLGLEVDQFLEDVRLQERTSGGLLSEAPNEKLFFVDTGSKEKGLTKKRTKVQKKSLLLKKPLRVDLILENTSKVPAPKDVLAHQVPNAKKLRRKEQLWEKLAKQGELPREVRRAQARLLNPSATRAKPGPQDTVERPFYDLWASDNPLDRPLVGQDEFFLEQTKKKGVKRPARLHTKPSQAPAVEVAPAGASYNPSFEDHQTLLSAAHEVELQRQKEAEKLERQLALPATEQAATQESTFQELCEGLLEESDGEGEPGQGEGPEAGDAEVCPTPARLATTEKKTEQQRRREKAVHRLRVQQAALRAARLRHQELFRLRGIKAQVALRLAELARRRRRRQARREAEADKPRRLGRLKYQAPDIDVQLSSELTDSLRTLKPEGNILRDRFKSFQRRNMIEPRERAKFKRKYKVKLVEKRAFREIQL

SEQ ID NO: 2401 - DNA, 728 bp, Homo sapien
gcggcctcagatgaatgcggctgttaagacctgcaataatccagaatggctactctgatctatgttgataaggaaaatggagaaccaggcacccgtgtggttgctaaggatgggctgaagctggggtctggaccttcaatcaaagccttagatgggagatctcaagtttcaacaccacgttttggcaaaacgttcgatgccccaccagccttacctaaagctactagaaaggctttgggaactgtcaacagagctacagaaaagtctgtaaagaccaagggacccctcaaacaaaaacagccaagcttttctgccaaaaagatgactgagaagactgttaaagcaaaaagctctgttcctgcctcagatgatgcctatccagaaatagaaaaattctttcccttcaatcctctagactttgagagttttgacctgcctgaagagcaccagattgcgcacctccccttgagtggagtgcctctcatgatccttgacgaggagagagagcttgaaaagctgtttcagctgggccccccttcacctgtgaagatgccctctccaccatgggaatccaatctgttgcagtctccttcaagcattctgtcgaccctggatgttgaattgccacctgtttgctgtgacatagatatttaaatttcttagtgcttcagagtttgtgtgtatttgtattaataaagcattcttcaacagaaaaaaaaaaaaaaaaa

SEQ ID NO: 2402 - protein, 202 aa, Homo sapien
MATLIYVDKENGEPGTRVVAKDGLKLGSGPSIKALDGRSQVSTPRFGKTFDAPPALPKATRKALGTVNRATEKSVKTKGPLKQKQPSFSAKKMTEKTVKAKSSVPASDDAYPEIEKFFPFNPLDFESFDLPEEHQIAHLPLSGVPLMILDEERELEKLFQLGPPSPVKMPSPPWESNLLQSPSSILSTLDVELPPVCCDIDI

SEQ ID NO: 2403 - DNA, 3188 bp, Homo sapien
cgggcagtgacagccggcgcggatcgcgcgtccacggaggagaatcagcttagagaactatcaacacaggacaatgcaagcccatgagctgttccggtattttcgaatgccagagctggttgacttccgacagtgcgtgactcttccgaccaacacgcttatgggcttcggagctttttccagacgactcaccaccttctggcggccacgccacccaaaacccctgaagccgccatggcacctctccatgcagtcagtggaagtggcgggtagtggtggtgcacgaagatccgcactacttgacagcgacgagcccttggtgtatttctatgatgatgttacaacattatacgaaggtttccagagagggatacaggtgtcaaataatggcccttgtttaggctctcggaaaccagaccaaccctatgaatggctttcatataaacaggttgcagaattgtcggagtgcataggctcagcactgatccagaagggcttcaagactgccccagatcagttcattggcatctttgctcaaaatagacctgagtgggtgattattgaacaaggatgctttgcttattcgatggtgatcgttccactttatgatacccttggaaatgaagccatcacgtacatagtcaacaaagctgaactctctctggtttttgttgacaagccagagaaggccaaactcttattagagggtgtagaaaataagttaataccaggccttaaaatcatagttgtcatggactcgtacggcagtgaactggtggaacgaggccagaggtgtggggtggaagtcaccagcatgaaggcgatggaggacctgggaagagccaacagacggaagcccaagcctccagcacctgaagatcttgcagtaatttgtttcacaagtggaactacaggcaaccccaaaggagcaatggtcactcaccgaaacatagtgagcgattgttcagcttttgtgaaagcaacagagaatacagtcaatccttgcccagatgatactttgatatctttcttgcctctcgcccatatgtttgagagagttgtagagtgtgtaatgctgtgtcatggagctaaaatcggatttttccaaggagatatcaggctgctcatggatgacctcaaggtgcttcaacccactgtcttccccgtggttccaagactgctgaaccggatgtttgaccgaattttcggacaagcaaacaccaccgtgaagcgatggctcttggactttgcctccaagaggaaagaagcagacgttcgcagcggcatcatcagaaacaacagcctgtgggaccggctgatcttccacaaagtacagtcgagcctgggcggaagagtccggctgatggtgacaggagccgccccggtgtctgccactgtgctgacgttcctcagagcagccctgggctgtcagttttatgaaggatacggacagacagagtgcactgccgggtgctgcctaaccatgcctggagactggaccacaggccatgttggggccccgatgccgtgcaatttgataaaacttggttggcagttggaagaaatgaattacatggcgtccgagggcgagggcgaggtgtgtgtgaaagggccaaatgtatttcagggctacttgaaggacccagcgaaaacagcagaagctttggacaaagacggctggttacacacaggggacatcggaaaatggttaccaaatggcaccttgaaaattatcgaccggaaaaagcacatatttaagctggcacaaggagaatacatagcccctgaaaagattgaaaatatctacatgcgaagtgagcctgttgctcaggtgtttgtccacggagaaagcctgcaggcatttctcattgcaattgtggtaccagatgttgagacattatgttcctgggcccaaaagagaggatttgaagggtcgtttgaggaactgtgcagaaataaggatgtcaaaaaagctatcctcgaagatatggtgagacttgggaaggattctggtctgaaaccatttgaacaggtcaaaggcatcacattgcaccctgaattattttctatcgacaatggccttctgactccaacaatgaaggcgaaaaggccagagctgcggaactatttcaggtcgcagatagatgacctctattccatcatcaaggtttagtgtgaagaagaaagctcagaggaaatggcacagttccacaatctcttctcctgctgatggccttcatgttgttaattttgaatacagcaagtgtagggaaggaagcgttctgtgtttgacttgtccattcggggttcttctcataggaatgctagaggaaacagaacactgccttacagtcacctcagtgttcagaccatgtttatggtaatacacacttccaaaagtagccttaaaaattgtaaagggatactataaatgtgctaattatttgagacttcctcagtttaaaaagtgggttttaaatcttctgtctccctgtttttctaatcaaggggttaggactttgctatctctgagatgtctgctacttcgtcgaaattctgcagctgtctgctgctctaaagagtacagtgctctagagggaagtgttccctttaaaaataagaacaactgtcctggctggagatctcacaagcggaccagagatctttttaaatccctgctactgtcccttctcacaggcattcacagaacccttctgattcgaagggttacgaaactcatgttcttctccagtcccctgtggtttctgttggagcataaggtttccagtaagcgggagggcagatccaactcagaaccatgcagataaggagcctctggcaaatgggtgctgcatcagaacgcgtggattctctttcatggcagatgctcttggactcggttctccaggcctgattccccgactccatcctttttcagggttatttaaaaatctgccttagattctatagtgaagacaagcatttcaagaaagagttacctggatcagccatgctcagctgtgacgcctgataactgtctactttatcttcactgaaccactcactctgtgtaaaggccaacggatttttaatgtggttttcatatcaaaagatcatgttgggattaacttgcctttttccccaaaaaataaactctcaggcaaggcatttcttttaaagctattccg

SEQ ID NO: 2404 - protein, 699 aa, Homo sapien
MQAHELFRYFRMPELVDFRQCVTLPTNTLMGFGAFSRRLTTFWRPRHPKPLKPPWHLSMQSVEVAGSGGARRSALLDSDEPLVYFYDDVTTLYEGFQRGIQVSNNGPCLGSRKPDQPYEWLSYKQVAELSECIGSALIQKGFKTAPDQFIGIFAQNRPEWVIIEQGCFAYSMVIVPLYDTLGNEAITYIVNKAELSLVFVDKPEKAKLLLEGVENKLIPGLKIIVVMDSYGSELVERGQRCGVEVTSMKAMEDLGRANRRKPKPPAPEDLAVICFTSGTTGNPKGAMVTHRNIVSDCSAFVKATENTVNPCPDDTLISFLPLAHMFERVVECVMLCHGAKIGFFQGDIRLLMDDLKVLQPTVFPVVPRLLNRMFDRIFGQANTTVKRWLLDFASKRKEADVRSGIIRNNSLWDRLIFHKVQSSLGGRVRLMVTGAAPVSATVLTFLRAALGCQFYEGYGQTECTAGCCLTMPGDWTTGHVGAPMPCNLIKLGWQLEEMNYMASEGEGEVCVKGPNVFQGYLKDPAKTAEALDKDGWLHTGDIGKWLPNGTLKIIDRKKHIFKLAQGEYIAPEKIENIYMRSEPVAQVFVHGESLQAFLIAIVVPDVETLCSWAQKRGFEGSFEELCRNKDVKKAILEDMVRLGKDSGLKPFEQVKGITLHPELFSIDNGLLTPTMKAKRPELRNYFRSQIDDLYSIIKV

SEQ ID NO: 2405 - DNA, 5785 bp, Homo sapien
cccagacccgcccccacttcccccctcaccctcccctccggcagcctctcccatggccactgctgcgggctgtgagcagagccccgtccttgagcagattgacctcatctttcagtcctgcagctgggctgagcggggagtcagctcagaagacactggcctggggatgagactcgggtcatgcttcagagggaagaaagagcttctgaacagacaatgctgtcttaaaggtggcatcttggtgctttctcatgccttgttttctttcatcctcagaatgtgtctgggggtgagaggacgggtgtgactgctgaaacttcctttcttggtgattccacatcactcctttctgatccctgagcctgtgccacgccctgtgtgatgtgccggggacaccagggtgaatacttacaggccctgttccccttccttcatgaaacagcctccttcgggctgggtcactgggcactggggcctccctggtcttccaggattgcaacttcacagaatcccttttccataaggcacatgaaagtgactgtgacccgcaacgggagccttgacaaccagccaattcagaacacagaccttgacatcggaaggccccgagttcaaatcctgccttgctccctttcagctggaaagctgtggtcaaattacttagcctctccaagccagttttcccttctgcaaaatgaggttacacaagctgccacctcacagaatgagtgtgagaattaattcttattttccacaccctcatttgacagggggagaaacagaagcccagagagggaaagggcttggttaggatcacaccatgagttgggggttaagtcaggatggggtaggtcccctctttctctgggtgttcctctcccccatcccttatctcaacataaatcctccccagttgcccaggttgtccaggcgattcctggcacacgtcctggggcctgccctccacctttagccctgctctggcttctgcagcagcagagtcctgggtgaccagcagtggcccctggccctctgagtggtggtggagggtgggggtgcactgcagcaagctcccagcccagagcagcctggccatataagggaaggagctcagggaggcctcctggctcaggcctggcgagaaaacccagacagccactgtttattttctcctccccagctcacccacgcctctccaagcctcccaacagaagacagaggtcccccacagccagagacatttcctgaagacatggggaacacagaggcagaaacagcccatccacccaggagctgtcccccacactgccgggagccggcacccagagccgccaggtaaaactgaggccacctggttcaacatcacctttcacagaaggggaagcagccacagaaagaagggcctcgttaagaagtggaacctgggacccccaagcggtgtctctcatcctgactggggatccagagtaggagggagcctttggtggggtaagtggaatggggtggggggggggcggggtggccatagacccctcttctcagtaaggccctcatgtgaaggaggcaggggttgggacaagtgctaagtatgcaagactcaagggaagagctgctggagccaggagaagcacctccctcccggcccctctgcccctcctcatagcccagctgcactgactcctcctccaggaagccttctcagcttccccaggggtgggaacctttttgtcctccaggtgtgcttggctgtcctttcttgggctctctctctctctctctcctcatcccacttgagtctgccccctattcaccttgtgaggggaattttccttctactcaatctgaccgaggtcctccaggtcaaggacagcgaggctctcagtcccacttccccttggcacatagaagaggcagtgcgctgaagggacaggtgaaatgattagaccctgcccccaaaccaaggcctggccaattggacagggcatgagacattcagcgtagaggttaaaacgagggccctgggttaggaaccccagctcagttctcagctctgtacccttggaaaattcccttcccatggagctttgtggatgcacaaggacttgcacaaagaaaacattcaatatccaggactataaaattccacaaatgattgtgcttattacattcattatcacgatgattattccagacacaaaggaacagaacgaggcaccaacagcaaggggcaagcagattcaagggccacagaggagatggaggcaaacaccttcccctggtcagaggctgtgcctcagcccttctccctgcatcagtttctccttcagaagcatgggactacctcccatctagttctcgtttctaaacctaggggagatgctatctttgctgcaataatcttagcctacatcttggaatggaaatggccttggtggaaatggtcttcaactcctctggtccaagctcaggccctgtgaccctggaacaatccccttcctggtcctccatgtaggagcaataacattcccttgccagcagcaccagccattctgatgattaaatggtatcggactctgttttccaaactcagtcattcagatgccccctattttatttcttccatgtctgcaaatgattataatatttttaaatgtaggatgagtcctttttattacacatagaaatagctactgtaaatagcaaactctaacactgtgcctaattaggaaataaaggtaaccataaatacagtaaaaatgaaacaatgttattatggtttaacctgatagtgtggcttgcaaggccctgggcctgaagcctgggcaataagtgagagttagaaaggtgtcaaagacatgatagcagcaaactgaggctttgtaccccacggtaaataggactgaaagcaaattcacagggagcaactgatccattccacaacagaatgctccctgtcaattcgctttccattctgttgtgtcctgtctcccagcagagactacaaactccccaaaaccacttacccaccagctgcacgtgagaagccaaaggtagtttatgtgaaagggctttggaaataatcacgcaccaagtgaaggcagaggacacaccttgtcagcttagttctcagcagcaaatcatctcttttccaggataaccctccctgattcttattgaaatctctttgctgaccacactaagctcttctctctcaggggcagtgggagccgtggagagtggaatagaccagctgtctgtgacctgcgagggagtccaatgtcggaatcactccccagccaaatgcacggttttaaaaaatctatttatttatttatgtagagaccaggctatgagactggctaatttttcgtatttttggatagagacaggatttcatcgtgttgcccaggctggtcttgaactcctgggctcaagcgatccacctgcctcggcttcccaaagtgctcaggattacaggcgtgagccactgtgcccagccaccaaatgcagttgaaaagagtttctgcaagataattccacagaagaggaaagcagttatctggctgggaataccttagacagaggctgtcctctacacaggctgtcagaactgacctactgacctgcctgctggcatgatagaccagagggaaacactctttccactcttcccagactgagtgtaagagacagacttttttttttttttttgagacggagtctcactctgtcacccaggctggagtgcaatggcaagatctcggctcactgcaacctccacctccccgggttcaaaccattctcctgcctcagcctcccaggtagctgggattacaggctcccgccaccacgcctggctaatttttgtatttttagtagagacagggtttcaccatgttggccgggctggtctcgaactcccaacctcaggtgatccgcctaccttggcctcccaaagggttgggattacaggtgtaagccactgctcccagccttttttttttttttattagagacaagggctccccatgttgcccaggctgatcttgaactctaggctcaagcgatcctcctgcctgagcctcccaaagtgctaggattacaggcatgagcactgctcccagctctgtttttgtttttttaaggaggtatattttttctgttctctctcagccctgaagaaaggctacccatccccttcagacattcctgaaaatatatgtcatccaacatcaaggccaccacagtgaccactaagcaatgcaagaaggtcctctggggtgccctgagatcttggcagggcaggaagagtgagaaggggctttgcctgctcacctgaaagttcccacccaagccgggcccagaaaacaaaatgaattatctacatggtcatccaatcagccaccaaatggcattacctaggtccatcatcatgtaccaagccacaggtcagacccagggccccccaaattaacaagacacaggcactgtcctcaggaagtggagatctagccaggtcagacccacacacaaataacactgatactagagataatgagattgggaattatgattcagccattcaacctgggcttatgtggcatctacaccacctggccctgatttcagtagtgagcacagttgacagggtcccttcccttcacaggtgagccatgtagtccacaagtggaggtggtcgtaagtgaaaaccacattaccagcatggtaaagggttagaaagagggcaccgggtgggcgagaacatgaagcagggggtgctgatggctaaagaagtaaaggaggggctgggcactgtggttcatgcctataatcccagcactttgggagaccaaggcgggtggatcacctgaggtcaggagttctagaccagcctgggcaacgtggtgaaaccctgtctctactaaaaatacaaaaattagccaggcatggtggtgcacgcctgtagtcccagctacttgggaggctggggcatgagaattgctttaacccggaaggtggagtttgcagtgagccgagatcgtgtcactgcactccagcctgggcgacagagggagactctgtctcaaaaaaaaaaaaaagtcaaggagggtttcccagagtggccacttgattagagacctagcacaggaggaagagatgggcagggagagtgacggggagcagcacagtccctgggagcccgaagtgggtgggcacagggctccctaggagaatggaaggacatctatgagctgtagcccaagaggaagaggtcactggggctagatgcggcagaccctcgcaggctttgggaagggcttcagaattcagcctgagggcaatggggagcccttttgggatattaaacttgagtaagatatgagcatatttgcatcttgaaaaatcattatgggaagatggctgggaagagaggaggagtggcagaagaaagataggttggagacaattgattgctcgatgatataaaatgttaagtaccatgaatgatgctgttaggctggaatgcgccaagcataaaggtggggcatggcatcaaaaggtaggtcaacatattaaataattccatgtattgaaatatccagaaaatatatagacagatctatagagatagaaactggtctgcccaggactaggggttgtctaaggataaggagcttcttttttggatggtgaaataacctaaaatatattgtgccattgtttgcacaactttgtgaatatattaaaaacctgttaattgtactcacaaaaaaaaaaaaaaaaa

SEQ ID NO: 2406 - DNA, 2650 bp, Homo sapien
gaattcggcacgagctgcagggtcaggaggagaatcgtggggccaggagggcagaggcacactccatcttcgtgctcctcacaggccctgcctccctgcctgctaaggacacagggaagggggtccccacctcagtgcctgcctcccttccctgtgcctgtgtacctggcagtcacagccacctggcgtgtcccagaaaccaaccggctgacctcatctcctgcccggccccacctccattggctttggcttttggcgtttgtgctgcccgaccctttctcctgtccggatgcgcagggcagggcctgagccgtcgagctgcacccacagcaggctgcctttggtgactcaccgggtgaacgggggcattgcgaggcatcccctccctgggtttggctcctgcccacggggctgacagtagaaatcacaggctgtgagacagctggagcccagctctgcttgaacctattttaggtctctgatccccgcttcctctttagactcccctagagctcagccagtgctcaacctgaggctgggggtctctgaggaagagtgagttggagctgaggggtctggggctgtcccctgagagaggggccagaggcagtgtcaagagccgggcagtctgattgtggctcaccctccatcactcccagggcccctggcccagcagccgcagctcccaaccacaatatcctttggggtttggcctacggagctggggcggatgacccccaaatagccctggcagattccccctagacccgcccgcaccatggtcaggcatgcccctcctcatcgctggcacagcccagagggtataaacagtgctggaggctggcggggcaggccagctgagtcctgagcagcagcccagcggatcctgagaacttcagggtgagtttggggacccttgattgttctttctttttcgctattgtaaaattcatgttatatggagggggcaaagttttcagggtgttgtttagaatgggaagatgtcccttgtatcaccatggaccctcatgataattttgtttctttcactttctactctgttgacaaccattgtctcctcttattttcttttcattttctgtaactttttcgttaaactttagcttgcatttgtaacgaatttttaaattcacttttgtttatttgtcagattgtaagtactttctctaatcacttttttttcaaggcaatcagggtatattatattgtacttcagcacagttttagagaacaattgttataattaaatgataaggtagaatatttctgcatataaattctggctggcgtggaaatattcttattggtagaaacaactacatcctggtcatcatcctgcctttctctttatggttacaatgatatacactgtttgagatgaggataaaatactctgagtccaaaccgggcccctctgctaaccatgttcatgccttcttctttttcctacagctcctgggcaacgtgctggttgttgtgctgtctcatcattttggcaaagaattaattccaactcaaaaatgcaggctcaacagtaccagcagcagcgtcgaaaatttgcagctgccttcttggcattcattttcatactggcagctgtggatactgctgaagcagggaagaaagagaaaccagaaaaaaaagtgaagaagtctgactgtggagaatggcagtggagtgtgtgtgtgcccaccagtggagactgtgggctgggcacacgggagggcactcggactggagctgagtgcaagcaaaccatgaagacccagagatgtaagatcccctgcaactggaagaagcaatttggcgcggagtgcaaataccagttccaggcctggggagaatgtgacctgaacacagccctgaagaccagaactggaagtctgaagcgagccctgcacaatgccgaatgccagaagactgtcaccatctccaagccctgtggcaaactgaccaagcccaaacctcaagcagaatctaagaagaagaaaaaggaaggcaagaaacaggagaagatgctggattaaaagatgtcacctgtggaacataaaaaggacatcagcaaacaggatcaattcactcctcaggtgcaggctgcctatcagaaggtggtggctggtgtggccaatgccctggctcacaaataccactgagatctttttccctctgccaaaaattatggggacatcatgaagccccttgagcatctgacttctggctaataaaggaaatttattttcattgcaatagtgtgttggaattttttgtgtctctcactcggaaggacatatgggagggcaaatcatttaaaacatcagaatgagtatttggtttagagtttggcaacatatgccatatgctggctgccatgaacaaaggtggctataaagaggtcatcagtatatgaaacagccccctgctgtccattccttattccatagaaaagccttgacttgaggttagattttttttatattttgttttgtgttatttttttctttaacatccctaaaattttccttacatgttttactagccagatttttcctcctctcctgactactcccagtcatagctgtccctcttctcttatggagatccctcgacctgcaggcaggcatgcaagctt

SEQ ID NO: 2407 - protein, 168 aa, Homo sapien
MQAQQYQQQRRKFAAAFLAFIFILAAVDTAEAGKKEKPEKKVKKSDCGEWQWSVCVPTSGDCGLGTREGTRTGAECKQTMKTQRCKIPCNWKKQFGAECKYQFQAWGECDLNTALKTRTGSLKRALHNAECQKTVTISKPCGKLTKPKPQAESKKKKKEGKKQEKMLD

SEQ ID NO: 2408 - DNA, 462 bp, Homo sapien
atggcctcgcccgacccgcccgccaccagctacgccccgtccgacgtgccctcgggggtcgcgctgttcctcaccatccctttcgccttcttcctgcccgagctgatatttgggttcttggtctggaccatggtagccgccacccacatagtataccccttgctgcaaggatgggtgatgtatgtctcgctcacctcgtttctcatctccttgatgttcctgttgtcttacttgtttggattttacaaaagatttgaatcctggagagttctggacagcctgtaccacgggaccactggcatcctgtacatgagcgctgccgtcctacaagtacatgccacgattgtttctgagaaactgctggacccaagaatttactacattaattcggcagcctcgttcttcgccttcatcgccacgctgctctacattctccatgccttcagcatctattaccactga

SEQ ID NO: 2409 - protein, 153 aa, Homo sapien; identical to SEQ ID NO: 815

SEQ ID NO: 2410 - DNA, 6515 bp, Homo sapien
cggacggctggcctctcaatttttgggaatagtttgagaagaattggtgtttgtttttctttataaattgggtagaaatcagcataaaagcctagtctagggcttttctcttttgggagactttatgttactgagtcaaacctgctattcattttgggtcagttcaggttttctgtttcttcctagttcaatcttggtaggctgtgtatgtctgggaatttatccctttcctctaggttttccaatttgttagcctatggttgttcataatagcctctaatgatcctttttatttctttggtaacagttgtaatgtctcctttttcatttctgattgtatttatttgggtctttttttttttttttttttttttttggttagcctcactagtggtttatcaattttgtttaacttttcaaaaaaccaacttttatcttgttgattctttgcatttcttttttgtctctgttgcatttggttctgctatgttatttatattttttctttctactaattgtgtgtttgatttgttcttgcattttgagttccttgaggtgcatcattaggtcgtttatttgaaatctttctacttttttggtgtaggcatttattgatataaacttttctcctagtactgcttttgttgtatcccataggttttgcatgatgtgtttccattttctgtttaaaaaaaatttttgatgtccatcttaatttcttcattgacccaatgattattcaatagcatgtttaatgtccatgtatttgtacagtttccaaatttcttcttcttattgatttcaagttttattccattgtggtctgagaagatacttgatatgattttaatttttaaaattttattgagccttgttctgtgtcctaacatatggtctatcctggagaatgttccatgtgttgatgagatgattgtatattctgctgctgctggatgaaatattctgaaaatatctgttaggtccatttggtctaaagtgcagcttaaatcaatgtttctttgttgattttatgtctagatgaactgtccaatgctgagagtaggatattgaagttctcaactatcattgtattggactctatctctccatgtagatttaataatatttgctctatgtctctggatgtgcttgtgttggttgcatgcatatttggaattgttatactttgttgctgaattgatccctttattaccatataatgaccttctttgtcctttttacagtttttgacttaaagtctgttttatctgatgtaagtttagctactcctgattatttttgatttctgtttgtgtggtatatctttttccatcccttcactttcagtctgtgtgtgtctttacaagtgaagtgagtttcttgtagacgttgttgggtcattttttatccattaagcctgtctctatcttttaggtaggtaatttaacccatattcgaagttattattgataggtgaggacttattcctgtcattttgttcattgttttctggttattttgtatatccttttgatatggtttggctgtgtccccactcagatctcatcttgaattcccatgtgttgtgggagggatccagtgggaagtagttgaatcatggaggcaggtatttcccatgctattcttttaatagtgaataagtctcatgagatctgatggttttaaaaggaggagtttccctgctcaagctctctctttgcctgctgccatccctgtaagatgtgacttgcctctccttgacttccgcaatgattttgaagcctccccagcaatgtagaactgtaagtccattaaacctctttcttttgtaaatttcccagtcttgaatgtgtctttatcagctgtgtgaaaatggactaatacagtaaattagtaccagaagtggggtgttgctaaaagatacctgaatatgtggaagtgactttggaactgggaaacaggcagaggctggaacagtttggagggctcagaaggagacaggaaaatgtgggaaaatttggaagagatttcctagagacttgcccaaaatgctgatggttatatggacaataaagtctaggcttaggttgtctcagatggaaatgaggaacttgttaggaactggcacaatggtgactcctgttatgttttagcaaagagactggtggctttttgcccctgctgtagagatttgtggaattttgaacttgagagatttagggtatctgatagggtatttgaacttgagatttagggtatctgatagaagaaatttctaagcagcaaagcattcaagagatgacttgggtgctgttaaaggccttcagttttataagggaagcagagcatgaaagtttggaaaatctgcagcctgacaatgcaatagaaaagaaaatcccattttctcaagaaaaattcgatctggctgcagaagtttctttaagtaactagagtcaaatgtgaatccccaagacaatggggaaaatgtctccagggcatgtcacaggtcttcatggcagcccctcccatcaaaggtccagaggcctaggaagaaaagatggttttgtggcctggacccagggacccatgttgtgagcagcctagggtgcctgagtcctagccactccagctgcagctaaaaggagccaaggtacaacgtgggctatggcttcagagggtgcaagccccaagccttagcagcttccacatagtgttgagcctgtgggtgcacagaagtcaaaaattgaggtttgggaactgctgcctagatttcagaaggtgtatggaaatgcctagatatccaggcaggagtttgctgcaggggcagggcactcatggagaacctctactagggcagtgcagaagggaaatgtggggtcggagcccccacatagagtccctactgcagcgccacctagtggagctgtgagaagagggccaccatcctccagacctcggaatggtggattcactgacagcttgcactgtgtgcctggaaaagctgcagacactcaatgccaacccgtgaaaggagccaggagggggtttaaacccacaggagtggagctgtggccttttttctcccaaggccatgggagcccacctcttacatcagcatgacctgcatgtgagacatggaatcaaaggagatcattttggagctttgagatttgactgccccactggattttgggcttgcatgggtcctgtagcccctttgttttgacaattttctgccatttggaatgactgtgtttacccaatgcctatacccccattgtatctaggaagtaactaacttgtttttgattttacatgctcataggcagaagggatttgccttgtctcacatgagactttggactgtggacttttgagttaatgctgaacttagttaagactttgggggactgttgggaaggcatgattggttttgaaatgtgaggatatgagatttgggaagggccaggggcagaatgatacagtttggttgtgtccccacccaagtctcatcttgaattcccacatgttgtgggagggacctggtgggaagtaattgagtcatgggggcaggtctttcccatgctgttctcatgatagtgaatacgtctcacaaggtgtgatggttttgaaaagggtagtttctctgcagaagctctatctttgattgctgccatccatgtgagacatgacttgcttcttcttgccttccaacgtgattcttaggcttcctcagctatgtggaagtgtaagtccattaaacctctttcttttgtaaattgcccagtctcagtcaggtatgtctttatcagcagtgtgaaaacagactaatacacctttgttccttttttctctcattatttatggttgcagtttggtgggtttctttagtggtgatgtttgaatcctttcttctttgtgtgtctgaactactagtgagttttatactttcatgtattttcatgatggtagatattgttcttttgcttcccaatgtaggactcccttaaacatttcttgtaggaccacaacaaacaagacacaaacaaacagtcttttgcttatctgggaaatacttttttctcttttattattactattttttttttagcaatggagtctcactctgccacccaggctggagtacagtggcatgatcatagctcactgcagccttgaactcctgggatcaaatggtcctcctgcctcagccttttgagtctctggaattgcagatgtgagccactgtgccaggcttcttcatttgtgaaggatagctttgctggatatagtatttttggcttacatttttttatttttattttacttgtagtatacatccccttttctcctagcctgtaaggtttctgctgagaaatcccctgttagcctgatggagattctcttataagtgacttgatgcctttctcttgctgtttttagcattttctctttgtcttttgacaattttacaataatgtgccttggagaagacctttttgagttgtatttatttggtaatctttgagcttcctgcatttggaagcattcaggaagttttcagttattattttattaaataggttttctatgcctttacccatctcatctccatccagaactcccagaatttcagtttttggtgacatatgtgtcccatatgtcatgtagccttgcttcattcttttttctttctttttgtctgactggattattttaaaagactagtcttcaggttcagaaattctttgttttgcttgatctagtctattgttaaagctgtcaattatcttttgtatttatttcaatgatttattctcttccaggatttgtgtttggttctttgttatgctgtctatctctgttgaatttgtcgttcagatactgaattgttttcctgtttggtttttttttttttttttttttttttttgtattcattatctgtgttctcttgtatctccctgagtttctttaataacattattctgaatttttttcaggcatttcatagattttcttttcattggatctgttgctggagaattattgtgcttctttggagatgttatgtttcctttttcatatttcttgcatccttatgtgactatctgtgcctctgacataacagtcatttcttccaattttatggattggcttttatatgggaaagaccttttcttatagctctatctacagtgttcattggatatcacactttggctttgattctgggtgggtacagtggtatagtctgcatatgattccttcagctgtaattggcatgagtggtgcctgtgagtcattcagtggcttagactgcagtgtttttttttgtggttgttgagatggagtctagctctgtcaccaggctggagtgcagtggcacaatctcagctcaccgcaacctctgcctcccgggttcaagcaattctcctgcctcagcctcctgagtagctgggactataggcacgtacaaccatgcgcagctaatttttgtatttttagtagagatggggtttcactatgttggccaggctgctctcgaactcctgacctcgtgatctacccgcctcggcctctcaaagtgctgggattacaggcgtgagccaccacacttggccagactgtagttgttattggaggctgtggtgaggctttgctgaggatggggatgccaggaagtcttgtccttcagcatcagtggtagcggtggtggaccaggtgtgtcaatactagggactgtgggcagtgtttgtgggcactgatgatagcctgtctgcgtgggccaatccctgggcctccaggtggctcctttggttgctggcagtggcagcactgggccaagtgggcaggtgcaccactgggctcctgggtggtgtgcgtggcaggctgatctctagttctccaggtgacatatgcaggttctggtggtgggtaggcaggcatttcctcaggcctctcagtagtaagtgtgagcactagctctggaggcagatgagtcaatctccaggcccccagatggtacattcaggcaccagcatattcctatgcatttctagataaaagtatttttcagaaaacctgagtgtatgtcctattaatacaactaaccctcatcagctctgcatgagaagaagggggaattccctcagtagaacagtcagaatggaatcacagacttgtttttagccagtcactggtaaggggggttaggctaaaatgataagctcagaatctaaaccttagactagggaatggcaaactttttccataaagatgcaaacggtaatattttaggcttttggtctagataacctctgtcgtagtgacacagtggtgccatcgtagcctaaaagcttatgtagacaatggataaatcaatggacctggttttattccagtaaaacttaatttatacagtcagagggccagatttggcccttggtctatagttggccaaccctgtttagagcagtcaaaatttattccctggggctgggccaactttttctt

SEQ ID NO: 2411 - DNA, 1394 bp, Homo sapien
gaccagggcgggcgagcgcagtgcagcgccgcgcggtgcgggcggccgagtgggggcgtcatggaggatgagcggagcttttcggatatctgcggcggccgcctggcgctgcagcgccgctactactccccgtcctgccgggaattctgcctcagctgccctcggctctcgctgcgttcgctcaccgctgtcacctgcacggtgtggctggcggcctacggactcttcaccctctgcgagaacagcatgatcctctctgctgccatcttcatcaccctcttaggtctgcttggttatctccattttgtgaagattgatcaggagactctgttaatcattgattcccttggcattcagatgacttcatcttatgcttcaggcaaagaaagcactaccttcatagaaatgggcaaggtcaaggatattgtcatcaatgaggccatttacatgcagaaggtgatttactacctctgcatcttattgaaagatccagtggaaccacatgggatatcccaagtagtacccgtcttccagagtgccaagccccggctggactgcttgattgaagtatacaggagctgccaggagatcctggcacaccagaaagccacatcaacaagcccatgagccccagcgttcagaaggccagcattgtcttccatgggagatgactcttaagccataggggctggttttccgtactccaaaccatcaggtggacacagtcctaggaaccattatggatgtagtgcatcttagagccatagagcaggtgactggaaatctaactcagtatatttccgtgtattatagtgttttccttgtaaggttttgcctactttaccaaaggaggggagaccttaagaattttgacacagtatgtcaaaagtaatgtcagcaaagaacactttcggaaattgctaagcatgttcaggtttactttgttgatgtttgtgaagcaaaacaatgggaaactgacatcagatgtcttgagaaagctatattttccaatagtaccccttgtgtaaagttacgaaaaaaaacaagcccttcagtactggttagcaggaagaaatgtcctacaaaagacgagtctgtcaacctagtgcctgtgttctgtacagggcttatttatttactgttaataaacagatcttccaaaacacacagttacctggttcacagatagctgctttttattgacaaacaagatcatagtatttcagtcatggtgtcaagcacattaatacttttctgttactcagcatttttttttatatcagttcaaaagctacttttgccaagaaggatgagacaaaaggccagacagaaattggactttggttttcagacatgggactctcatgttaacaaagaataaataagcaaatatt

SEQ ID NO: 2412 - protein, 188 aa, Homo sapien
MEDERSFSDICGGRLALQRRYYSPSCREFCLSCPRLSLRSLTAVTCTVWLAAYGLFTLCENSMILSAAIFITLLGLLGYLHFVKIDQETLLIIDSLGIQMTSSYASGKESTTFIEMGKVKDIVINEAIYMQKVIYYLCILLKDPVEPHGISQVVPVFQSAKPRLDCLIEVYRSCQEILAHQKATSTSP

SEQ ID NO: 2413 - DNA, 2499 bp, Homo sapien
tgacagcagttggtaaactgcttttagggatactggctgacttcaagtggattaataccttgtatctttatgttgctaccttaatcatcatgggcctagccttgtgtgcaattccatttgccaaaagctatgtcacattggcgttgctttctgggatcctagggtttcttactggtaattggtccatctttccatatgtgaccacgaagactgtgggaattgaaaaattagcccatgcctatgggatattaatgttctttgctggacttggaaatagcctaggaccacccatcgttggttggttttatgactggacccagacctatgatattgcattttattttagtggcttctgcgtcctgctgggaggttttattctgctgctggcagccttgccctcttgggatacatgcaacaagcaactccccaagccagctccaacaactttcttgtacaaagttgcctctaatgtttagaagaatattggaagacactatttttgctattttataccatatagcaacgatattttaacagattctcaagcaaattttctagagtcaagactattttctcatagcaaaatttcacaatgactgactctgaatgaattatttttttttatatatcctattttttatgtagtgtatgcgtagcctctatctcgtatttttttctatttctcctccccacaccatcaatgggactattctgttttgctgttattcactagttcttaacattgtaaaaagtttgaccagcctcagaaggctttctctgtgtaaagaagtataatttctctgctgactccatttaatccactgcaaggcacctagagagactgctcctattttaaaagtgatgcaagcatcatgataagatatgtgtgaagcccactaggaaataaatcattctcttctctatgtttgacttgctagtaaacagaagacttcaagccagccaggaaattaaagtggcgactaaaacagccttaagaattgcagtggagcaaattggtcattttttaaaaaaatatattttaacctacagtcaccagttttcattattctatttacctcactgaagtactcgcatgttgtttggtacccactgagcaactgtttcagttcctaaggtatttgctgagatgtgggtgaactccaaatggagaagtagtcactgtagactttcttcatggttgaccactccaaccttgctcacttttgcttcttggccatccactcagctgatgtttcctggaagtgctaattttacctgtttccaaattggaaacacatttctcaatcattccgttctggcaaatgggaaacatccatttgctttgggcacagtggggatgggctgcaagttcttgcatatcctcccagtgaagcatttatttgctactatcagattttaccactatcaaatataattcaagggcagaattaaacgtgagtgtgtgtgtgtgtgtgtgtgtgtgtgctatgcatgctctaagtctgcatgggatatgggaatggaaaagggcaataagaaattaatacccttatgcagttgcatttaaccttaagaaaaatgtccttgggataaactccaatgtttaatacattgattttttttctaaagaaatgggttttaaactttggtatgcatcagaattccctatagatctttttgaaaatataggtacctgggtatcacacatagaacttttaattctgctggtgtaggctgttgcccaaacatctataattttactgagctcttcaagtgattctgataacacagcctggattgagaatttttataagattggcaatggaaaaacatttattcttttaaataataatttttttaaaacccaagaggtcaggggattttataaaccaatagccaagtgttctttaaataggaggcacccttcccattgtgccaaaatcatcttttcatttattttgaaatttgtatgattattttatacttgtatgttgcctttcttcgaaggcgcctgaagcactttataaacacaaatcctcacaatacctctgtgaggtaggtaaatagtacttttctatgtagtaaacctggaatatggagaatttcataacagttcattctacttaataatgcaataatggagctccaagttgtcttggacttctacaccacactcagacttctggaaagttttctgtacctcattctttagtccctgtcaaggttagtaaataaaataagtgacataaaaaaaaaaaaaaaactaaactacttgttgtgttgaaagttcctttttgccagttatgttcaggaaacccaataacctgaaaaagtttgactttgatgtgacatcttcatattcatcaatgctgataattgtccaaaggcatcttcactatgtctgctaaataacatccaatgtgggcgttatctgttgtctaggggatgaattttaagttacaataaaatatttttctttgttttgcatcaaaaaaaaaa

SEQ ID NO: 2414 - DNA, 1334 bp, Homo sapien
gagcccgcctctatgatgaagttcaagcccaaccagacgcggacctacgaccgcgagggcttcaagaagcgggcggcgtgcctgtgcttccggagcgagcaggaggacgaggtgctgctggtgagtagcagccggtacccagaccagtggattgtcccaggaggaggaatggaacccgaggaggaacctggcggtgctgccgtgagggaagtttatgaggaggctggagtcaaaggaaaactaggcagacttctgggcatatttgagaaccaagaccgaaagcacagaacatatgtttatgttctaacagtcactgaaatattagaagattgggaagattctgttaatattggaaggaagagagagtggttcaaagtagaagatgctatcaaagttctccagtgtcataaacctgtacatgcagagtatctggaaaagctaaagctgggttgttccccagccaatggaaattctacagtcccttcccttccggataataatgccttgtttgtaaccgctgcacagacctctgggttgccatctagtgtaagatagagagaactgggtaggcctctcccaccatgtgcagtctcatggggagaggcttctttcgtttcctcgtcaaacatctgattgacgcttgcaaactgtctgaatttgccatgcaaggttttcaaacaatttgcatgtttttcagatgctttcaaatctttttttaaaaaaatagtgtaaaatattttaataagccaaagccatgtggaatttttgtttagatgccttaactgtgccacaccccacaaccccctatattattttggttgtctatttctcacagcatattttcagttttttgtccatttgacatcagtctgtggtttattttgtcatcagattacttgtgggtatacctaccccaaaattgttttctcattcacagcattagcatattcagcaaatccatctgtggtgggaattaaaaatattattggtattaaagaaatccattcaccccaaaacttgttttacaggattacaattttaattcaaaatttccagatttgggctatttctgtatgatccaataacttattttgtcacagggcttaatttgccatttttggggatttgtcgactcattttgtctgaattttcacaactggtattatgtcactagctacctgatacggctatttcccttataactcaatagtaccttaacacaaagtataactctgtagagttggtgaatattttagggaaatattagcaaaatgcatgtagtaaagacatcttatgaaaactgtaaaaaaaaaaaaaaaaaaaaaaaaaaaaaa

SEQ ID NO: 2415 - protein, 180 aa, Homo sapien
MMKFKPNQTRTYDREGFKKRAACLCFRSEQEDEVLLVSSSRYPDQWIVPGGGMEPEEEPGGAAVREVYEEAGVKGKLGRLLGIFENQDRKHRTYVYVLTVTEILEDWEDSVNIGRKREWFKVEDAIKVLQCHKPVHAEYLEKLKLGCSPANGNSTVPSLPDNNALFVTAAQTSGLPSSVR

SEQ ID NO: 2416 - DNA, 598 bp, Homo sapien
  Unsure 124: Unknown base
cataacacagccagctttttgctagccagaccaaactcaaagagcaatggctgtacttctgaaatagcaacactttgtcctagctgagatttggtaataagattttttttttaagtttttaaangaagctcagtggttgaaagtctgcttaactgaaacagtaacatccatgatgtgtgttttgtgcatgtttgtatttgaaaggccttcatgtttttgtttcttgtttgtttttctctcctaagaccttgtcttttttttgtagcaaaagtttttttttttttttccttttacttctcagttgactgaattctgttttcaccggattttttgactaaaatagctattgcaacagaggctactcttgggttaaggaagaatgtagtttcgttttatgtttaatatcgctcaaagaaaaataaaagcatctccctctaacaccaccagacttttcctctctgtaccttatcatgtaaattttgctatttgattttcacctgggttgtttcctttaatgtgcaaaaatttaaggctatttagctgacaactgcctagggttgtaaaacaggttatcaagaatctgaaagtctaagatagg

SEQ ID NO: 2417 - DNA, 1125 bp, Homo sapien
taatttcttgggtttgacccatatggattcatctatctctcacaagaatactcaaccaactgcttatacatctattatgggttccatgaaagttttatcctttattgcagatggattctatatatattatcctatgttggtggtaattctctgcattgctacttattttagtttgggaacccgttgtttgaatctgctcggtttccagcagtttatgggagatgatgatatgacatcagacttagttaatgaaggaaaagaattaatcagaaaagagaagagaaaaaggcaaaggcaagaagaaggtgaaaatcgaagaagagaatggaaagaacgttatggacacaatagagaagattccactaggaacagaaatattcatactgaccccaaagagtcaaacttctcagatgttaataccaaccgttctgcattcaaatataccagggctaataacaggactgaaagggaccggatagaacttctccaagatgcagaacctttggattttaatgcagaaacattcactgatgatcctcttgaatctgaatcaggaaggtatcagcctggtggacgatatctctcgatgtctcgcagtgacatatttaatgatgtttaaagtctgaaaaagtttgtgggaccactaaccaaggtcaacacatcagttcagtcttgatgaacatctgtgtaccctagaatttcctctatacacagtgaaaagtgtcaagataacaaaaaaggcactgagaattaattatatcttaggaataatagtttaatgtgcattgaatagagtatcacctttttcaacaagatttattacatatcatttcctaagcatctgccttagaaatacagttacagtggaaggactttaagaaagatcaacatatgttaagaacatgcagttcagtttgtttcagattaattttttttcaagagagttattttaaagattcaaggaagccataagtcatactaaataatattatatacagttttgttattgtgacttacatttttgttacttctaaaaagtatattcaacctgtatttcccaaagaaatgtaagtgaatggagacctcaaataataactgtattcataaaaaaaaaaaaaaaaaaaa

SEQ ID NO: 2418 - DNA, 729 bp, Homo sapien
atgcgacagctggagaacgctgggcagcaccacaccctccaattcacactgccttctagttgtgccaactggaaccaccctttggctgtgctgcgaaatggaccccagtgttgttgtgggtgtgtcaaatcccctttcatcctcaagagctccctgcttcccttagattatttcaatacggtgatatccttatttgctagcagaaaagggactaacgtccccattcctcttttctgctgcgtcccactggctcagagaagcaaggcggtgcgcggttgggcagaaacctgggaggagtctccaagcccaattcacagcacacaacggcagtgcacacaaagaaatgacatggaaatagatgcaggcaggctggtccctgctgtgattaacgagaactccaagtacaaggccgaccacaatggatgctgcaaaaacgttgactggggcaaaggattttttattttattttttattttgttaattatgtttttaggggatgggaggtggtgtgtgtttttctcctcttggttttcatttgctcaagcacacaaaagggacttttgtttactctatcatgaacaaaggaactgtccacatactgtaaaccatgagcagtgttgttgttgtttttttaaacagtatatttggtggtctctttgtctgcttttatttccagttcgatcttctgggtttagttttgtctttaaaaagaattcaaaaaaagactga

SEQ ID NO: 2419 - protein, 242 aa, Homo sapien
MRQLENAGQHHTLQFTLPSSCANWNHPLAVLRNGPQCCCGCVKSPFILKSSLLPLDYFNTVISLFASRKGTNVPIPLFCCVPLAQRSKAVRGWAETWEESPSPIHSTQRQCTQRNDMEIDAGRLVPAVINENSKYKADHNGCCKNVDWGKGFFILFFILLIMFLGDGRWCVFFSSWFSFAQAHKRDFCLLYHEQRNCPHTVNHEQCCCCFFKQYIWWSLCLLLFPVRSSGFSFVFKKNSKKD

SEQ ID NO: 2420 - DNA, 2108 bp, Homo sapien
ctgtcaccaagcaggagagttaaggattcaccatgagctgggaaatgcttttgccatgagtatgagcaaattccctctttccctgaatcatggacattctagattaaaagaacattttttgtgctcttaacaagaaaaccatggccctcctttgttcaagtatcacaagaaataaacccacagctccagagaaggtgaccattctcagaactccagctattcactctccagggagaaggacctcaaatcgccactctttgggcggcaggtgcggtccccacggccggctctacgaggaagagttctggctcttttgtccactgagatggtcttggtttttcacttaacaaattttttaatggaatctttgtttttgttctccatcttgtttgttagagtctctcggcctttatttacaaattccttgcaactagagcgctccttccccaagatatggtagtgagagtaatttttcattgtagctgtagtctccatcagtaacagcaggccctggaagacttgatcacctttttctgtgtcattttcagtcaaagagggcctctcttacatcttgtttgctttcaaatccccaaatatcatctccatctcccaattaattttattctctctttcctctgtattcgctttctcctgttttttttttaaaaaaaagcatgaaaaaggaagagaaaaagtttgatatgccaaggacagattttgaaacagacttggtaaatgttttccttagctccttcatgggcatgctggtgaaagaataaatacatccaattaaagctcatgctggggtcggggagaagaggatactgaaacatttgtgaaatgtatgaatgcacttctgtaaccagatacttctgttcttctgttcaaattgtggggtttttgttacagttaggacgcccatgaagatttaggggtgaaaaaaacagcagagtatttattaaactacagcattgtacaattagcttagtaacactatggaataagctaaaacatatcacagtttttacatgggccaaaacatgaattgagtatgtggtcacatgaaaacacgcatgaatgaataaaacactctttggtggtgactgaggcatcattagaaggcccagacgatttccactattcacagcatttccttttctcagaaggactctttatatttccatgtaaatctagatctttggagcaattaagatggaattacaatttctagggagcattttaaggaaaatgttttggctttttcataattttatgtcttacagtatggaattataatacgaaaatctttatatgagttttggcttcttggtatttgtacttattcaggggaaaaagtctttcgattacttatgcctctatagagcttaatttcttgagaaattcaacagtcattttcaccagcataattttatcttaaggaataactaataggaaaagtcagcttaattatttaaggccctagtttctacatataatatattcgatagtaatgaaaatctgccgtggaattaactaataagtagtaacaataaacttcatatttagaatgcaaagtctataaagaataattttacatgatcctcaatatcaactccagtttaaaaagtgttatttttaaaacatttgaaaccaagtactgtttaatttcaatcagaagatgcaaataaatactttgatctatgtttgattttgctaataatatttgaaggagattgcctaccaaggacaaaacaataaatttaaaaatcaaacgatttctccatacgctcatagtcacatatggaattttgagaaaataaagcatgctgtctttaggaatttttatacttctttgtctttcttccttaatatttgcttctagctgctcttggcaatgatgaattgttatgtatgcattaatgttttgcagcccaaaagttgttcacatttttcctatataagatctgtggagtgtgtgtttcaaagagagaactacagaaatgttaaagcaggaaaacctgaatgtgatgtgcacattttcatcccacatggacaatgtatgtgttttaataaatggaattttcagattcaaaaaaaaaaaaaaattc

SEQ ID NO: 2421 - DNA, 2225 bp, Homo sapien
cgcttttttttttttttttttttttggagacggagtcttgctctgtcacccaggctggatctcagctcactgcaacctctgcctcctgggtttaagcgatcctcccacctcagcctccccagtagctgggactacaggcacccaccaccgctcctagctgtaaggttttttttgtatttttagtagagaggggttttaccatgttgaccaggctggtctcgaactcctgacctcaggtgatccacctgcctcggcctcccaaagtggtgggattacaggcgtgagccaccacgcccaggcttccttccaagttcttaaggtgcatgccgagcaaattaatgttctaccttcttttccaatatgactatcaaaagatacacgagttcaattgaaaaaaatatatatatatataaatttccctttgtatatcttcttttattgcaacatacagattttgatatgtagtttttctagaattatttagttctaagcgttttaagattttggttgtaatttctccttgcacctgtgagttgtttagaagtttgttattaagtttccaaacatagaagtttgtataatgttacttttggtgtgtatttttccccttgtgaagaacttacaaggagtggaaatttgatttgactgtatttcactgcatcattaggacttgaaagttctcatggtagggttttattacaggttaatttcagtttaacagtaatgttttcaatacttatttaatatgcttgaagacttcttaagtaaaaattcctaagtaaaatcttaagtaaaaattctaagaggaagtaagaaccccagcaccctattgtgaggttagaagaataagaaagggagtctggactaattttaaacagaaagaggagaatttcactgtggtggggaaatatagtaaagataaaactcccccttttttggtttctttgtaattcaaattgggtgatcatatgcaggaacttagttctcattaatgagtaacatatatagggaaacatgcaaatccatgcaggctccttgatcagaggcatagttagtgaaatacatcagtggttctgctgtctgacttgtttctgcttctctctgtttgcttttataggtagaagaagtgaaaaagcaccaacactgtttagcatttagctcctctggaccccaaagccagacttactacatttgctttgatactttcacagaatacttaaggtggctgcgacaagtctccaaggtaagcaagcacttaatccaggaatccactcagcttctagctggctacaaagttcctttctgctttagctgggtctaaaatatggttagttacacacactttttttttcctccccagatactgccagtgattagcaatttttagttttttaaaaactaattttgcctgaaaagtggctttttaaaaattgttttttacttgcccagtttatacttaaaaataaattggtctgtaaacaggcattactatcttaatgttgtagataaaaaacatgagattgggaatatttgagggactgacccaggctaagacaactataaaaccacaaaatacccagagaattgttacaaatttcccttctttctctgactgttttttcatataaatagtctaatattataccatctccccttcacctttattctgccttttcagtgatttaattttttatcttattttggccattttatattcctctgatttaataagatcaccatgtcccatgaaataatatatagtacttttggccaggcacactggctcactcctgtaatcccagcactttggaaggctgagacaggcagatcacttgagttcaggagtttgagaccagcctggccaaaatggtgaaaccccgtctctactagaaatacaaaaaaattagccaggcatgatggtacgcacctgtagtcccagatacttgggaggctgaggcacgaaaattgcgaactgggaaggtggaggttgcaatgagccgagattgcaccattacactacagccttggtgacagagtgagactctgacttaaaaaaaaaatatatatatatgtatatatataatataatatataattatatataatatatattttataatatatatatataatatctagtgcttttgtgtttaatgtaaaccagaatcacattataaataagacaaataaatgctgatatttcaggtaaaaaaaaaaaaaaaaaa

SEQ ID NO: 2422 - DNA, 2273 bp, Homo sapien
aagacagtctcgatctctgtcctgtggtatacagcatccagggaagtgcccagggaccagggcaggcagaggtcttcctgcctttaccccacctgggcccagttcctgcgcaggggcttggccagtcctggtcagctttccctctgatgactgcaggaagagagtcagacgcggaactcccagggtgcagaggcctgcggggtctgaagggcctcctccctctccagtgtggtgactgggctgaggagatgctgggactgagagtgtcatggtggagcctccgtccctgctcatcctctccgcatgttgcttctgctcccgatggctctctctgaaatgcagcacaacctcctaggccaatggaagaaggcccagagctggctccctgcctggaagcacgaggagacccgcacaggcatcctgagaaggcgtggagagcaggctgccttcatggggggagtgccagggcctgggcacccacacccgctgacccaagagggcccgggcacctgcgtgctggcctcttcactgaccttcgctctgtctgctctctttgtgtctctctctgacctccagaggcctcctttctctctgccaggaacagtagcccccctgcaaggccctccttttcctccagcccgcagcctgcggcctctccggttctgctccacagcccggctgccacacactcgcctctctctccaggccccccgggttccctccgcctctcttgctgcctgttctctccttttgcaggttgcgtttattggcttatctctgggggttggtgctctcccttgtttccatggaaactgcctggccccaggaggcccaagcagctttgagctccaagggcaggaccatgcaggccatcgctgccctgccgcttagccacagggcacgatttctgactcggtttattagagacatagtgtggcagtctctagaccccacagtcgggctggcatctggggacaggaccaacacccccacaccccagaggcgaactgtggtgagtgtaaagagcccctctccaggggaagacagccggccagagtgcggtgtgctgtgctggagagcacagccccaggcgtgacaaacacctcggcctcttagaagttgtcccttatctggacaggaagtctggaggctgaaacagagactcccaccttcccagagtctcctgggcagtgccacacagatgccatatgctggccccgtggccacactccagcactcagcccccttgcccacctcactcctgagttagcacactttccaggtgtcagcaggtgtgatcaggggctcagagccagggtcctgtgagagcccaggggtctttggttgcacctcctgcgtgcacttcctgacagcgcccacctcactgccacccagagctcagacccaagggagggtggagaggggctgagggacaggcctggagtaggggtgtatgcactgcaggctgagatgagcaattgaggggcaagtgtccagcaggagggagaaactgggaacagagtccttgtcactccaggggatgttgctgctcactcagcactcactcagggctctgggagccaggcctagctctcagggcagagggtgtggcagggaagtgagatgatcacactcagagcccagtgagaggcagtgaggaaaaccaccagcgagaccagtgtggtggctcacacctgtaatcccagcactttgggaagtcaaggcaggtggatcccttgagctcaggagttcaagaccagcctgggcaacatagcaagaccccatctctacaaaaaatacaaaaactagccaggcagggctgggcgcggtggctcacgcctgtaatcccagcactttgggaggccgaggcgggcggatctcgaggtcaggagattgagaccatcccggctaacacggtgaaaccccgtctctactaaaaatacaaaaaaaattagctgggcatggtggcaggtgcctgtagtcccagctactcgggaggctgaggcagaagaatggcgtgaacttgggaggtggagcttacagtgagccgagatcacaccactgcactccagcctgggggacagagcgagactccgtctcaaaaaaaaaaaaaaaaaaactagccaggcgggcatggtggtggcacccatctgtagtcccagctacttgggaggctgaggtgggaggatcgcctgagcctgagggggatgttgccgtgagccaagagcttgtgactggactccagcctgggcaacagagcaagaccctgtctc

SEQ ID NO: 2423 - protein, 195 aa, Homo sapien
MLLLLPMALSEMQHNLLGQWKKAQSWLPAWKHEETRTGILRRRGEQAAFMGGVPGPGHPHPLTQEGPGTCVLASSLTFALSALFVSLSDLQRPPFSLPGTVAPLQGPPFPPARSLRPLRFCSTARLPHTRLSLQAPRVPSASLAACSLLLQVAFIGLSLGVGALPCFHGNCLAPGGPSSFELQGQDHAGHRCPAA

SEQ ID NO: 2424 - DNA, 1785 bp, Homo sapien; identical to SEQ ID NO: 311

SEQ ID NO: 2425 - protein, 483 aa, Homo sapien; identical to SEQ ID NO: 312

SEQ ID NO: 2426 - DNA, 5723 bp, Homo sapien
gcagccgccacattcaacaggcagcagcgcagcgggcgcgccgctggggagagcaagcggcccgcggcgtccgtccgtccttccgtccgcggccctgtcagctggagcgcggcgcaggctctgccccggcccggcggctctggccggccgtccagtccgtgcggcggaccccgaggagcctcgatgtggatggccccgcgaagttaagttctgggctcgcgcttccactccgccgcgccttcctcccagtttccgtccgctcgccgcaccggcttcgttcccccaaatctcggaccgtcccttcgcgccccctccccgtccgcccccagtgctgcgttctccccctcttggctctcctgcggctgggggaggggcgggggtcaccatggccgaggcgcctcaggtggtggagatcgacccggacttcgagccgctgccccggccgcgctcgtgcacctggccgctgcccaggccggagtttagccagtccaactcggccacctccagcccggcgccgtcgggcagcgcggctgccaaccccgacgccgcggcgggcctgccctcggcctcggctgccgctgtcagcgccgacttcatgagcaacctgagcttgctggaggagagcgaggacttcccgcaggcgcccggctccgtggcggcggcggtggcggcggcggccgccgcggccgccaccggggggctgtgcggggacttccagggcccggaggcgggctgcctgcacccagcgccaccgcagcccccgccgcccgggccgctgtcgcagcacccgccggtgccccccgccgccgctgggccgctcgcggggcagccgcgcaagagcagctcgtcccgccgcaacgcgtggggcaacctgtcctacgccgacctcatcaccaaggccatcgagagctcggcggagaagcggctcacgctgtcgcagatctacgagtggatggtcaagagcgtgccctacttcaaggataagggtgacagcaacagctcggcgggctggaagaattcaattcgtcataatctgtccctacacagcaagttcattcgtgtgcagaatgaaggaactggaaaaagttcttggtggatgctcaatccagagggtggcaagagcgggaaatctcctaggagaagagctgcatccatggacaacaacagtaaatttgctaagagccgaagccgagctgccaagaagaaagcatctctccagtctggccaggagggtgctggggacagccctggatcacagttttccaaatggcctgcaagccctggctctcacagcaatgatgactttgataactggagtacatttcgccctcgaactagctcaaatgctagtactattagtgggagactctcacccattatgaccgaacaggatgatcttggagaaggggatgtgcattctatggtgtacccgccatctgccgcaaagatggcctctactttacccagtctgtctgagataagcaatcccgaaaacatggaaaatcttttggataatctcaaccttctctcatcaccaacatcattaactgtttcgacccagtcctcacctggcaccatgatgcagcagacgccgtgctactcgtttgcgccaccaaacaccagtttgaattcacccagcccaaactaccaaaaatatacatatggccaatccagcatgagccctttgccccagatgcctatacaaacacttcaggacaataagtcgagttatggaggtatgagtcagtataactgtgcgcctggactcttgaaggagttgctgacttctgactctcctccccataatgacattatgacaccagttgatcctggggtagcccagcccaacagccgggttctgggccagaacgtcatgatgggccctaattcggtcatgtcaacctatggcagccaggcatctcataacaaaatgatgaatcccagctcccatacccaccctggacatgctcagcagacatctgcagttaacgggcgtcccctgccccacacggtaagcaccatgccccacacctcgggtatgaaccgcctgacccaagtgaagacacctgtacaagtgcctctgccccaccccatgcagatgagtgccctggggggctactcctccgtgagcagctgcaatggctatggcagaatgggccttctccaccaggagaagctcccaagtgacttggatggcatgttcattgagcgcttagactgtgacatggaatccatcattcggaatgacctcatggatggagatacattggattttaactttgacaatgtgttgcccaaccaaagcttcccacacagtgtcaagacaacgacacatagctgggtgtcaggctgagggttagtgagcaggttacacttaaaagtacttcagattgtctgacagcaggaactgagagaagcagtccaaagatgtctttcaccaactcccttttagttttcttggttaaaaaaaaaaacaaaaaaaaaaaccctcctttttttcctttcgtcagacttggcagcaaagacatttttcctgtacaggatgtttgcccaatgtgtgcaggttatgtgctgctgtagataaggactgtgccattggaaatttcattacaatgaagtgccaaactcactacaccatataattgcagaaaagattttcagatcctggtgtgctttcaagttttgtatataagcagtagatacagattgtatttgtgtgtgtttttggtttttctaaatatccaattggtccaaggaaagtttatactctttttgtaatactgtgatgggcctcatgtcttgataagttaaacttttgtttgtactacctgttttctgcggaactgacggatcacaaagaactgaatctccattctgcatctccattgaacagccttggacctgttcacgttgccacagaattcacatgagaaccaagtagcctgttatcaatctgctaaattaatggacttgttaaacttttggaaaaaaaaagattaaatgccagctttgtacaggtcttttctatttttttttgtttattttgttatttgcaaatttgtacaaacatttaaatggttctaatttccagataaatgatttttgatgttattgttgggacttaagaacatttttggaatagatattgaactgtaataatgttttcttaaaactagagtctactttgttacatagtcagcttgtaaattttgtggaaccacaggtatttggggcagcattcataattttcattttgtattctaactggattagtactaattttatacatgcttaactggtttgtacactttgggatgctacttagtgatgtttctgactaatcttaaatcattgtaattagtacttgcatattcaacgtttcaggccctggttgggcaggaaagtgatgtatagttatggacactttgcgtttcttatttaggataacttaatatgtttttatgtatgtattttaaagaaatttcatctgcttctactgaactatgcgtactgcatagcatcaagtcttctctagagacctctgtagtcctgggaggcctcataatgtttgtagatcagaaaagggagatctgcatctaaagcaatggtcctttgtcaaacgagggattttgatccacttcaccattttgagttgagctttagcaaaagtttcccctcataattctttgctcttgtttcagtccaggtggaggttggttttgtagttctgccttgaggaattatgtcaacactcatacttcatctcattctcccttctgccctgcagattagattacttagcacactgtggaagtttaagtggaaggagggaatttaaaaatgggacttgagtggtttgtagaatttgtgttcataagttcagatgggtagcaaatggaatagaacttacttaaaaattggggagatttatttgaaaaccagctgtaagttgtgcattgagattatgttaaaagccttggcttaagaatttgaaaatttctttagcctgtagcaacctaaactgtaattcctatcattatgttttattactttccaattacctgtaactgacagaccaaattaattggctttgtgtcctatttagtccatcagtattttcaagtcatgtggaaagcccaaagtcatcacaatgaagagaacaggtgcacagcactgttcctcttgtgttcttgagaaggatctaatttttctgtatatagcccacatcacacttgctttgtcttgtatgttaattgcatcttcattggcttggtatttcctaaatgtttaacaagaacacaagtgttcctgataagatttcctacagtaagccagctgtattgtaagcttcccaccgtgatgatcatttttttgaagattcattgaacagccaccactctatcatcctcattttggggcagtccaagacatagctggttttagaaacccaagttcctctaagcacagcctcccgggtatgtaactgaacttggtgccaaagtacttgtgtactaatttctattactacgtactgtcactttcctcccgtgccattactgcatcataatacaaggaacctcagagcccccatttgttcattaaagaggcaactacagccaaaatcactgttaaaatcttactacttcatggagtagctcttaggaaaatatatcttcctcctgagtctgggtaattatacctctcccaagcccccattgtgtgttgaaatcctgtcatgaatccttggtagctctctgagaacagtgaagtccagggaaaggcatctggtctgtctggaaagcaaacattatgtggcctctggtagtttttttcctgtaagaatactgactttctggagtaatgagtatatatcagttattgtacatgattgctttgtgaaatgtgcaaatgatatcacctatgcagccttgtttgatttattttctctggtttgtactgttattaaaagcatattgtattatagagctattcagatattttaaatataaagatgtattgtttccgtaatatagacgtatggaatatatttaggtaatagatgtattacttggaaagttctgctttgacaaactgacaaagtctaaatgagcacatgtatcccagtgagcagtaaatcaatggaacatcccaagaagaggataaggatgcttaaaatggaaatcattctccaacgatatacaaattggacttgttcaactgctggatatatgctaccaataaccccagccccaacttaaaattcttacattcaagctcctaagagttcttaatttataactaattttaaaagagaagtttcttttctggttttagtttgggaataatcattcattaaaaaaaatgtattgtggtttatgcgaacagaccaacctggcattacagttggcctctccttgaggtgggcacagcctggcagtgtggccaggggtggccatgtaagtcccatcaggacgtagtcatgcctcctgcatttcgctacccgagtttagtaacagtgcagattccacgttcttgttccgatactctgagaagtgcctgatgttgatgtacttacagacacaagaacaatctttgctataattgtataaagccataaatgtacataaattatgtttaaatggcttggtgtctttcttttctaattatgcagaataagctctttattaggaattttttgtgaagctattaaatacttgagttaa

SEQ ID NO: 2427 - protein, 655 aa, Homo sapien
MAEAPQVVEIDPDFEPLPRPRSCTWPLPRPEFSQSNSATSSPAPSGSAAANPDAAAGLPSASAAAVSADFMSNLSLLEESEDFPQAPGSVAAAVAAAAAAAATGGLCGDFQGPEAGCLHPAPPQPPPPGPLSQHPPVPPAAAGPLAGQPRKSSSSRRNAWGNLSYADLITKAIESSAEKRLTLSQIYEWMVKSVPYFKDKGDSNSSAGWKNSIRHNLSLHSKFIRVQNEGTGKSSWWMLNPEGGKSGKSPRRRAASMDNNSKFAKSRSRAAKKKASLQSGQEGAGDSPGSQFSKWPASPGSHSNDDFDNWSTFRPRTSSNASTISGRLSPIMTEQDDLGEGDVHSMVYPPSAAKMASTLPSLSEISNPENMENLLDNLNLLSSPTSLTVSTQSSPGTMMQQTPCYSFAPPNTSLNSPSPNYQKYTYGQSSMSPLPQMPIQTLQDNKSSYGGMSQYNCAPGLLKELLTSDSPPHNDIMTPVDPGVAQPNSRVLGQNVMMGPNSVMSTYGSQASHNKMMNPSSHTHPGHAQQTSAVNGRPLPHTVSTMPHTSGMNRLTQVKTPVQVPLPHPMQMSALGGYSSVSSCNGYGRMGLLHQEKLPSDLDGMFIERLDCDMESIIRNDLMDGDTLDFNFDNVLPNQSFPHSVKTTTHSWVSG

SEQ ID NO: 2428 - DNA, 3003 bp, Homo sapien
gtgatctgcaagtcctgggagacgcacagctaagatgcccggacatcctggaagctgggaaatggtgatgtgactcttcttcagcctgcaccctccaaaagaggattgtgatgtatcactggacccagcacctagatgacgtgtgattgtgacacatacctctgctcagaatgtgagcgatttgactctcctgcctgggcccagtacacagatgggattgtgacatatcgctggacccagcatgtagatcatgtgaccctatactcttgccttggtgctgtcgcagagggcattgtgacatatcactggtccctgcacccagggaccattgacatttatggatgtggccatagaattctgtctggaggagtggcaatgcctggacattgcacagcagaatttatataggaatgtgatgttagagaactacagaaacctggtcttcctgggtattgctgtctctaagccagacctgatcacctgtctggagcaagaaaaagagccttgggagcctatgaggagacatgaaatggtagccaaacccccagttatgtgttctcattttacccaagacttttggccagagcagcatataaaagatcctttccaaaaagcgacactgagaagatataaaaactgtgaacataaaaatgtacatttaaaaaaagaccataaaagtgtggatgagtgtaaggtgcacagaggaggttataatggatttaaccaatgtttgccagctacccagagcaaaatatttctatttgataaatgtgtgaaagcctttcataaattttcaaattcaaacagacataagataagccatactgaaaaaaaacttttcaaatgcaaagaatgtggcaaatcattttgcatgcttccacatctagctcaacataaaataattcataccagagtgaatttctgcaaatgtgaaaaatgtggaaaagcttttaactgcccttcaatcatcactaaacataagagaattaatactggagagaaaccctacacatgtgaagaatgtggcaaagtctttaattggtcctcacgccttactacacataaaaaaaattatactagatacaaactctacaaatgtgaagaatgtggcaaagcttttaacaagtcctcaatccttactacccataagataattcgcactggagagaaattctacaaatgtaaagaatgtgccaaagcttttaaccaatcctcaaaccttactgaacataagaaaattcatcctggagagaaaccttacaaatgtgaagaatgtggcaaagcctttaactggccctcaactcttactaaacataagagaattcatactggagagaaaccctacacatgtgaagaatgtggcaaagcttttaaccagttctcaaaccttactacacataagagaatccatactgcagagaaattctataaatgtacagaatgtggtgaagcttttagccggtcctcaaaccttactaaacataagaaaattcatactgaaaagaaaccctacaaatgtgaagaatgtggcaaagcttttaagtggtcctcaaagcttactgaacataagttaactcatactggagagaaaccctacaaatgtgaagaatgtggcaaagcctttaactggccctcaacccttactaaacataacagaattcatactggagagaaaccctacaaatgtgaagtatgtggcaaagcttttaaccagttctcaaaccttactacacataagagaattcatactgcagaaaaaccgtacaaatgtgaagaatgtggcaaagcttttagccggtcctcaaaccttactaaacataagaaaattcacattgaaaagaaaccctacaaatgtgaagaatgtggcaaagcttttaagtggtcctcaaagcttactgaacataagataactcatactggagagaaaccctacaaatgtgaagaatgtggcaaagcttttaaccatttctcaatccttaccaaacataagaggattcatactggagagaaaccctacaagtgtgaagaatgtggcaaagcttttacccaatcctcaaaccttactacacataagaaaattcatactggagagaaattctacaaatgtgaagaatgtggcaaagcttttacccaatcttcaaaccttactacacataaaaaaattcatactggaggaaaaccctacaaatgtgaagaatgtggcaaagcttttaaccagttctcaactcttactaaacataagataattcacactgaggagaaaccctacaaatgtgaagaatgtggcaaagcctttaagtggtcctcaacccttactaaacataagataattcatactggagagaaaccctacaaatgtgaagaatgtggcaaagcttttaaactgtcctcaaccctttctacacataagattattcatactggagagaaaccctacaaatgtgaaaaatgtggcaaagcttttaaccgaccctcaaaccttattgaacataagaaaattcatactggagagcaaccctacaaatgtgaagaatgtggcaaagcatttaactattcctcacaccttaatacacataagagaattcatactaaagagcaaccctacaaatgtaaagaatgtggcaaagctttcaaccaatattcaaaccttactacacataacaaaattcatactggagagaaactctacaaacctgaagatgtgacagtgattttgacaacacctcaaactttttcaaacataaaataaattatactggtgagaaattctagaaatgtaaagaatgtgataaaggctttacatggttgtcacacttgattgtaggtaagataatttacattggagtaaacttctacaagtgtgaagaatgtggcaaaacttttaattaatgctcataccttattgcacaggaaagaatttttacttggaaaaaggtatatacacaaagaatgtggaaaagccattaatatgtgctcatatcttactcaacatcagagagtctg

SEQ ID NO: 2429 - protein, 803 aa, Homo sapien
MDVAIEFCLEEWQCLDIAQQNLYRNVMLENYRNLVFLGIAVSKPDLITCLEQEKEPWEPMRRHEMVAKPPVMCSHFTQDFWPEQHIKDPFQKATLRRYKNCEHKNVHLKKDHKSVDECKVHRGGYNGFNQCLPATQSKIFLFDKCVKAFHKFSNSNRHKISHTEKKLFKCKECGKSFCMLPHLAQHKIIHTRVNFCKCEKCGKAFNCPSIITKHKRINTGEKPYTCEECGKVFNWSSRLTTHKKNYTRYKLYKCEECGKAFNKSSILTTHKIIRTGEKFYKCKECAKAFNQSSNLTEHKKIHPGEKPYKCEECGKAFNWPSTLTKHKRIHTGEKPYTCEECGKAFNQFSNLTTHKRIHTAEKFYKCTECGEAFSRSSNLTKHKKIHTEKKPYKCEECGKAFKWSSKLTEHKLTHTGEKPYKCEECGKAFNWPSTLTKHNRIHTGEKPYKCEVCGKAFNQFSNLTTHKRIHTAEKPYKCEECGKAFSRSSNLTKHKKIHIEKKPYKCEECGKAFKWSSKLTEHKITHTGEKPYKCEECGKAFNHFSILTKHKRIHTGEKPYKCEECGKAFTQSSNLTTHKKIHTGEKFYKCEECGKAFTQSSNLTTHKKIHTGGKPYKCEECGKAFNQFSTLTKHKIIHTEEKPYKCEECGKAFKWSSTLTKHKIIHTGEKPYKCEECGKAFKLSSTLSTHKIIHTGEKPYKCEKCGKAFNRPSNLIEHKKIHTGEQPYKCEECGKAFNYSSHLNTHKRIHTKEQPYKCKECGKAFNQYSNLTTHNKIHTGEKLYKPEDVTVILTTPQTFSNIK

SEQ ID NO: 2430 - DNA, 2470 bp, Homo sapien
ttggcgggcggaagcggccacaacccggcgatcgaaaagattcttaggaacgccgtaccagccgcgtctctcaggacagcaggcccctgtccttctgtcgggcgccgctcagccgtgccctccgcccctcaggttctttttctaattccaaataaacttgcaagaggactatgaaagattatgatgaacttctcaaatattatgaattacatgaaactattgggacaggtggctttgcaaaggtcaaacttgcctgccatatccttactggagagatggtagctataaaaatcatggataaaaacacactagggagtgatttgccccggatcaaaacggagattgaggccttgaagaacctgagacatcagcatatatgtcaactctaccatgtgctagagacagccaacaaaatattcatggttcttgagtactgccctggaggagagctgtttgactatataatttcccaggatcgcctgtcagaagaggagacccgggttgtcttccgtcagatagtatctgctgttgcttatgtgcacagccagggctatgctcacagggacctcaagccagaaaatttgctgtttgatgaatatcataaattaaagctgattgactttggtctctgtgcaaaacccaagggtaacaaggattaccatctacagacatgctgtgggagtctggcttatgcagcacctgagttaatacaaggcaaatcatatcttggatcagaggcagatgtttggagcatgggcatactgttatatgttcttatgtgtggatttctaccatttgatgatgataatgtaatggctttatacaagaagattatgagaggaaaatatgatgttcccaagtggctctctcccagtagcattctgcttcttcaacaaatgctgcaggtggacccaaagaaacggatttctatgaaaaatctattgaaccatccctggatcatgcaagattacaactatcctgttgagtggcaaagcaagaatccttttattcacctcgatgatgattgcgtaacagaactttctgtacatcacagaaacaacaggcaaacaatggaggatttaatttcactgtggcagtatgatcacctcacggctacctatcttctgcttctagccaagaaggctcggggaaaaccagttcgtttaaggctttcttctttctcctgtggacaagccagtgctaccccattcacagacatcaagtcaaataattggagtctggaagatgtgaccgcaagtgataaaaattatgtggcgggattaatagactatgattggtgtgaagatgatttatcaacaggtgctgctactccccgaacatcacagtttaccaagtactggacagaatcaaatggggtggaatctaaatcattaactccagccttatgcagaacacctgcaaataaattaaagaacaaagaaaatgtatatactcctaagtctgctgtaaagaatgaagagtactttatgtttcctgagccaaagactccagttaataagaaccagcataagagagaaatactcactacgccaaatcgttacactacaccctcaaaagctagaaaccagtgcctgaaagaaactccaattaaaataccagtaaattcaacaggaacagacaagttaatgacaggtgtcattagccctgagaggcggtgccgctcagtggaattggatctcaaccaagcacatatggaggagactccaaaaagaaagggagccaaagtgtttgggagccttgaaagggggttggataaggttatcactgtgctcaccaggagcaaaaggaagggttctgccagagacgggcccagaagactaaagcttcactataatgtgactacaactagattagtgaatccagatcaactgttgaatgaaataatgtctattcttccaaagaagcatgttgactttgtacaaaagggttatacactgaagtgtcaaacacagtcagattttgggaaagtgacaatgcaatttgaattagaagtgtgccagcttcaaaaacccgatgtggtgggtatcaggaggcagcggcttaagggcgatgcctgggtttacaaaagattagtggaagacatcctatctagctgcaaggtataattgatggattcttccatcctgccggatgagtgtgggtgtgatacagcctacataaagactgttatgatcgctttgattttaaagttcattggaactaccaacttgtttctaaagagctatcttaagaccaatatctctttgtttttaaacaaaagatattattttgtgtatgaatctaaatcaagcccatctgtcattatgttactgtcttttttaatcatgtggttttgtatattaataattgttgactttcttagattcacttccatatgtgaatgtaagctcttaactatgtctctttgtaatgtgtaatttctttctgaaataaaaccatttgtgaatat

SEQ ID NO: 2431 - protein, 651 aa, Homo sapien
MKDYDELLKYYELHETIGTGGFAKVKLACHILTGEMVAIKIMDKNTLGSDLPRIKTEIEALKNLRHQHICQLYHVLETANKIFMVLEYCPGGELFDYIISQDRLSEEETRVVFRQIVSAVAYVHSQGYAHRDLKPENLLFDEYHKLKLIDFGLCAKPKGNKDYHLQTCCGSLAYAAPELIQGKSYLGSEADVWSMGILLYVLMCGFLPFDDDNVMALYKKIMRGKYDVPKWLSPSSILLLQQMLQVDPKKRISMKNLLNHPWIMQDYNYPVEWQSKNPFIHLDDDCVTELSVHHRNNRQTMEDLISLWQYDHLTATYLLLLAKKARGKPVRLRLSSFSCGQASATPFTDIKSNNWSLEDVTASDKNYVAGLIDYDWCEDDLSTGAATPRTSQFTKYWTESNGVESKSLTPALCRTPANKLKNKENVYTPKSAVKNEEYFMFPEPKTPVNKNQHKREILTTPNRYTTPSKARNQCLKETPIKIPVNSTGTDKLMTGVISPERRCRSVELDLNQAHMEETPKRKGAKVFGSLERGLDKVITVLTRSKRKGSARDGPRRLKLHYNVTTTRLVNPDQLLNEIMSILPKKHVDFVQKGYTLKCQTQSDFGKVTMQFELEVCQLQKPDVVGIRRQRLKGDAWVYKRLVEDILSSCKV

SEQ ID NO: 2432 - DNA, 5316 bp, Homo sapien
atcatggcggatggccccaggtgtaagcgcagaaagcaggcgaacccgcggcgcaataacgttacaaattataatactgtggtagaaacaaattcagattcagatgatgaagacaaactgcatattgtggaagaagaaagtgttacagatgcagctgactgtgaaggtgtaccagaggatgacctgccaacagaccagacagtgttaccagggaggagcagtgaaagagaagggaatgctaagaactgctgggaggatgacagaaaggaagggcaagaaatcctggggcctgaagctcaggcagatgaagcaggatgtacagtaaaagatgatgaatgcgagtcagatgcagaaaatgagcaaaaccatgatcctaatgttgaagagtttctacaacaacaagacactgctgtcatttttcctgaggcacctgaagaggaccagaggcagggcacaccagaagccagtggtcatgatgaaaatggaacaccagatgcattttcacaattactcacctgtccatattgtgatagaggctataaacgctttacctctctgaaagaacacattaaatatcgtcatgaaaagaatgaagataactttagttgctccctgtgcagttacacctttgcatacagaacccaacttgaacgtcacatgacatcacataaatcaggaagagatcaaagacatgtgacgcagtctgggtgtaatcgtaaattcaaatgcactgagtgtggaaaagctttcaaatacaaacatcacctaaaagagcacttaagaattcacagtggagagaagccatatgaatgcccaaactgcaagaaacgcttttcccattctggctcctatagctcacacataagcagtaagaaatgtatcagcttgatacctgtgaatgggcgaccaagaacaggactcaagacatctcagtgttcttcaccgtctctttcagcatcaccaggcagtcccacacgaccacagatacggcaaaagatagagaataaaccccttcaagaacaactttctgttaaccaaattaaaactgaacctgtggattatgaattcaaacccatagtggttgcttcaggaatcaactgttcaacccctttacaaaatggggttttcactggtggtggcccattacaggcaaccagttctcctcagggcatggtgcaagctgttgttctgccaacagttggtttggtgtctcccataagtatcaatttaagtgatattcagaatgtacttaaagtggcggtagatggtaatgtaataaggcaagtgttggagaataatcaagccaatcttgcatccaaagaacaagaaacaatcaatgcttcacccatacaacaaggtggccattctgttatttcagccatcagtcttcctttggttgatcaagatggaacaaccaaaattatcatcaactacagtcttgagcagcctagccaacttcaagttgttcctcaaaatttaaaaaaagaaaatccagtcgctacaaacagttgtaaaagtgaaaagttaccagaagatcttactgttaagtctgagaaggacaaaagctttgaagggggggtgaatgatagcacttgtcttctgtgtgatgattgtccaggagatattaatgcacttccagaattaaagcactatgacctaaagcagcctactcagcctcctccactccctgcagcagaagctgagaagcctgagtcctctgtttcatcagctactggagatggcaatttgtctcctagtcagccacctttaaagaacctcttgtctctcctaaaagcatattatgctttgaatgcacaaccaagtgcagaagagctctcaaaaattgctgattcagtaaacctaccactggatgtagtaaaaaagtggtttgaaaagatgcaagctggacagatttcagtgcagtcttctgaaccatcttctcctgaaccaggcaaagtaaatatccctgccaagaacaatgatcagcctcaatctgcaaatgcaaatgaaccccaggacagcacagtaaatctacaaagtcctttgaagatgactaactccccagttttaccagtgggatcaaccaccaatggttccagaagtagtacaccatccccatcacctctaaacctttcctcatccagaaatacacagggttacttgtacacagctgagggtgcacaagaagagccacaagtagaacctcttgatctttcactaccaaagcaacagggagaattattagaaaggtcaactatcactagtgtttaccagaacagtgtttattctgtccaggaagaacccttgaacttgtcttgcgcaaaaaaggagccacaaaaggacagttgtgttacagactcagaaccagttgtaaatgtaatcccaccaagtgccaaccccataaatatcgctatacctacagtcactgcccagttacccacaatcgtggccattgctgaccagaacagtgttccatgcttaagagcgctagctgccaataagcaaacgattctgattccccaggtggcatacacctactcaactacggtcagccctgcagtccaagaaccacccttgaaagtgatccagccaaatggaaatcaggatgaaagacaagatactagctcagaaggagtatcaaatgtagaggatcagaatgactctgattctacaccgcccaaaaagaaaatgcggaagacagaaaatggaatgtatgcttgtgatttgtgtgacaagatattccaaaagagtagttcattattgagacataaatatgaacacacaggtaaaagacctcatgagtgtggaatctgtaaaaaggcatttaaacacaaacatcatttgattgaacacatgcgattacattctggagaaaagccctatcaatgtgacaaatgtggaaagcgcttctcacactctgggtcttattctcaacacatgaatcatcgctactcctactgtaagagagaagcggaagaacgtgacagcacagagcaggaagaggcagggcctgaaatcctctcgaatgagcacgtgggtgccagggcgtctccctcacagggcgactcggacgagagagagagtttgacaagggaagaggatgaagacagtgaaaaagaggaagaggaggaggataaagagatggaagaattgcaggaagaaaaagaatgtgaaaaaccacaaggggatgaggaagaggaggaggaggaggaagaagtggaagaagaagaggtagaagaggcagagaatgagggagaagaagcaaaaactgaaggtctgatgaaggatgacagggctgaaagtcaagcaagcagcttaggacaaaaagtaggcgagagtagtgagcaagtgtctgaagaaaagacaaatgaagcctaatcgtttttctagaaggaaaataaattctaattgataatgaatttcgttcaatattatccttgcttttcatggaaacacagtaacctgtatgctgtgattcctgttcactactgtgtgtgtgtgcgcgtgcattgattactatccatttctttagtcaacgctctccacttcctgatttctgctttaaggaaaactgtgaactttctgcttcatgtatcagttttaaagcatcccaggcaaagatcatctacagattctaggaattctctcccctgaaatcaaaacctggagacttttttttcttattttagttgagaagttcataaactgctcaaggattagttttccaggactctgcggaggaacggcaggaagaacctcagagagggcagaggtgacttcaaagtgctggggactccgtcctgagggtcacttggccctgagcccctgcgtgcccttgcggaagcccagaagcttcttcctgctgcacctcccgtttccgctgctgctgacgtttatgcatttcatgatggggtccaacaagaacacctgacttgggtgaagttgtgcaatattggaggctgactgtagggctgggcagctgggagacaggctcatggctcatggctcatggctcagggcggtgcctgccctgggccgggacccccctccccaccccccacctaggctttttgggttttgttcaaggaaggtaaagtgagaggtttaggtcagtgtttttaagtttttgttttttttttaaagcaaatcctgtatatgtatctacatgggagataggtagacactacttatttgttacattttgtactatacgtttgtgttccaggtttcagcttccctcgctcctgttgttaagaagcgtccctgtcagcacaggtgtgcattgaggaaggggccccagggccttcgctccctcagcactggggtggaggcggcaggaaggggcggcccttacctggcaggtctgggcgcacctttagcaggtggactccgtggggctccaccagccagaagcctctggaaggcaacgaaggcaatgctgctccctgagtccagtccccgcccccaaacccagcccaggtgccttcagctacttcggcttcttaaaccctgcagtgttaaacagaggcattgagaaaggggaaaggcgggtatttttaaaagccaaagattgacccaagttacttgagggtagggaggcgggcccagtgcaggaggctgcatccctggcctgctggtgcccaccgggggctgtgcctgtgccgggccgcaggaagctggctgcccccattcctgctgctgctgctgctgctgctctgtggctgtttcaaagactgggcgaaaggctgtccggagggcagaccaggtgccttgccgcagagaaaacaccaaagtctcctgttcgctcataaagaagtttttgggatgggagagaatccagaccatcttggggcagccaggcccttgccttcatttttacagaggtagcacaactgattccaacacaaaaccccttcccctttttaaaatgatttctgttctaatgccatagatcaaaggcctcagaaaccattgtgtgtttcctctttgaagcaatgacaagcactttactttcacggtggtttttgttttttcttattgctgtggaacctcttttggaggacgttaaaggcgtgttttacttgtttttttaagagtgtgtgatgtgtgttttgtagatttcttgacagtgctgtaatacagacggcaatgcaatagcctatttaaagaactacgtgatctgattgagatgtacatagtttttttttttaccataactgaattattttatctcttatgttatcatgagaaatgtatgccaaatgattagttgatgtatgttttttaatttaatatttaaataaaatatttggaagg

SEQ ID NO: 2433 - protein, 1124 aa, Homo sapien
MADGPRCKRRKQANPRRNNVTNYNTVVETNSDSDDEDKLHIVEEESVTDAADCEGVPEDDLPTDQTVLPGRSSEREGNAKNCWEDDRKEGQEILGPEAQADEAGCTVKDDECESDAENEQNHDPNVEEFLQQQDTAVIFPEAPEEDQRQGTPEASGHDENGTPDAFSQLLTCPYCDRGYKRFTSLKEHIKYRHEKNEDNFSCSLCSYTFAYRTQLERHMTSHKSGRDQRHVTQSGCNRKFKCTECGKAFKYKHHLKEHLRIHSGEKPYECPNCKKRFSHSGSYSSHISSKKCISLIPVNGRPRTGLKTSQCSSPSLSASPGSPTRPQIRQKIENKPLQEQLSVNQIKTEPVDYEFKPIVVASGINCSTPLQNGVFTGGGPLQATSSPQGMVQAVVLPTVGLVSPISINLSDIQNVLKVAVDGNVIRQVLENNQANLASKEQETINASPIQQGGHSVISAISLPLVDQDGTTKIIINYSLEQPSQLQVVPQNLKKENPVATNSCKSEKLPEDLTVKSEKDKSFEGGVNDSTCLLCDDCPGDINALPELKHYDLKQPTQPPPLPAAEAEKPESSVSSATGDGNLSPSQPPLKNLLSLLKAYYALNAQPSAEELSKIADSVNLPLDVVKKWFEKMQAGQISVQSSEPSSPEPGKVNIPAKNNDQPQSANANEPQDSTVNLQSPLKMTNSPVLPVGSTTNGSRSSTPSPSPLNLSSSRNTQGYLYTAEGAQEEPQVEPLDLSLPKQQGELLERSTITSVYQNSVYSVQEEPLNLSCAKKEPQKDSCVTDSEPVVNVIPPSANPINIAIPTVTAQLPTIVAIADQNSVPCLRALAANKQTILIPQVAYTYSTTVSPAVQEPPLKVIQPNGNQDERQDTSSEGVSNVEDQNDSDSTPPKKKMRKTENGMYACDLCDKIFQKSSSLLRHKYEHTGKRPHECGICKKAFKHKHHLIEHMRLHSGEKPYQCDKCGKRFSHSGSYSQHMNHRYSYCKREAEERDSTEQEEAGPEILSNEHVGARASPSQGDSDERESLTREEDEDSEKEEEEEDKEMEELQEEKECEKPQGDEEEEEEEEEVEEEEVEEAENEGEEAKTEGLMKDDRAESQASSLGQKVGESSEQVSEEKTNEA

SEQ ID NO: 2434 - DNA, 3342 bp, Homo sapien
gctaatgaatgaatgtgatcatttaaaagaaagtctctttcagtatgagagagagaaaacagaagtagtagtggttgtgagacaacttcaacaagaagtggctgacagcgtaaaaaaattaacgacgttagagtctccactggaaggtatatcatgttgtcacattaatttggatgagacacaggcctcaaataagaaattatttcaagtgaaaagtcaaatataagaaactcctggaaatgacaataaatatgttaaatgtatttggaaatgaagactttgattgccatggagacttaaaaacagatcaactgaaaatggatattctgattaagaagctaaaacagaagtttgatgatcttacagcacagaaggaagctttatcttcaaaatgtgtcaatttggctaaagacaatcaagttcttcaacaggagtttttatctatgaaaaaagtacaacagcaatgtgaaaaacttgaggaggataaaaagatgttgaaagaagaaatattaaatcttaagacacatatggaaaacaatagggtagaaattagtaaactacaagaatataaattggagctagatgaaaaggcaatgcaggcagtagaaaaattagaagaaatccatttacaggaacaagcacaatatgaaaaacaattagagcagttaaacaaggataatatggcttcactaaataaaaaggaactcacacttaaagatgtggaatgtaaattctcagaaatgaaaactgcttatgaagaggttacaaccgaattagaagaatataaggaagcctttgcagcagcattgaaagctaacaattccatgtcaaaaaagttaacaaaatcaaataagaaaatagcagtgattagcatgaagctcctcatggagaaagagcagatgaaatattttctcagtgctcttcctacaaggcgagacccagagtcaccttgtgttgaaaatcttactagtataggactcaacagaaaatatattccccaaacacccataagaattcctatttcaagcccacagacttcaaataactgcaagaactcctagactgtgatggagctggactgtgtagaacaaataactagagaaacaaagagaattgttgctgtgttgaacacttgctcccgtctacttacttctctataatccactgccatggaatgagtgatttttcttagaagcagaggtggagccactgaggaagcacaggcgagccctccccagcacgtgctcactggtccccaacagaacaaccgctgccgcatccatgaggctcccattgtggtgggttgtgtcaccccacaatgtcactgttgctgagcccccatcgcctctgtgttgtggagcagttagagacacactgtggtgtctgagtggctctgtgtgaaggaccgttttctaggtgagaggcacatctcaacacagctgactgatcagactcaaccattttgcacaccctggtcagaatgaaacattccttgggaactcgggccgtgagaagcatccttcctgatcacctgactgtagaaacatccttatcgcaccctcccgggcaaaggcccaacagcctgactgcaggaacatccttgccatatcctgccgggcagcaagctctaccgcccacgcccctccttcccagtcccatgatcaccccagcctgtgagaggcagttggtgctggcagtaagctggtttcctcctctgcagggttttgctagtaataaaggtgttgctgttgaagccgtcaaaaaaaaaaaaaaaaaaggccagcatcgagtcggccttgttggattctggggcccgaggtcgagcccgccgctgccgccgtcgcctgagggaagcgagaagaggccgcgaccggagagaaaaagcggagtcgccaccggagagaagtcgactccctagcagcagccgccgccagagaggcccgcccaccagttcgcccgtccccctgccccgttcacaatgcagcctgcttctgcaaagtggtacgatcgaagggactatgtcttcattgaattttgtgttgaagacagtaaggatgttaatgtaaattttgaaaaatccaaacttacattcagttgtctcggaggaagtgataattttaagcatttaaatgaaattgatctttttcactgtattgatccaaatgattccaagcataaaagaacggacagatcaattttatgttgtttacgaaaaggagaatctggccagtcatggccaaggttaacaaaagaaagggcaaagcttaattggcttagtgtcgacttcaataattggaaagactgggaagatgattcagatgaagacatgtctaattttgatcgtttctctgagatgatgaacaacatgggtggtgatgaggatgtagatttaccagaagtagatggagcagatgatgattcacaagacagtgatgatgaaaaaatgccagatctggagtaaggaatattgtcatcacctggattttgagaaagaaaaataacttctctgcaagatttcataattgagagaattcctgagttgatagctctaaaggcagatatgctgtatttgcctactttaacccatttttcaacctgtttgttttttaaaaggcttcactaagggttgatatgtaccattgtatggggcaattttaagtcagctaaggcaataaccttatgcatgagcatttcccagactttcatgaagctgttgaggtcctaggcaattaatgcagcagttgcgataaataaaaacatctcacctaagtctccttttcttcataacatagatactgacatgataggaagctctcagcttagggaaagagaataaattttagattatagaacatggattcaaaagtgactggaacaaattggctgacaccttactggtaacctgctattcttctggtgttatccttcaggattgttccactaaaatttatttttcaaaaaatttacttcacattattctatgtaagtgatgacttgtcagtgttccaggtgtatcttagctaaaactagagaatgccctaacttagatggtttttgaagcctatacaattggtattgtttgacccttaagcttttacatctcttagcatggaggacgaagaaagctgtacattgttgcttgagagtctgtacatttagtccagatttgtatttgcactgtcagtatggcaaatgagtgaaaaatgtttaatacactattggattttttatttcctttttttgattcagcttatacccgggctgaaaacctcaatttatgttcatgacagtggggatttttttaaatgtctacattctttctaataaactgttggaagactt

SEQ ID NO: 2435 - protein, 273 aa, Homo sapien
MTINMLNVFGNEDFDCHGDLKTDQLKMDILIKKLKQKFDDLTAQKEALSSKCVNLAKDNQVLQQEFLSMKKVQQQCEKLEEDKKMLKEEILNLKTHMENNRVEISKLQEYKLELDEKAMQAVEKLEEIHLQEQAQYEKQLEQLNKDNMASLNKKELTLKDVECKFSEMKTAYEEVTTELEEYKEAFAAALKANNSMSKKLTKSNKKIAVISMKLLMEKEQMKYFLSALPTRRDPESPCVENLTSIGLNRKYIPQTPIRIPISSPQTSNNCKNS

SEQ ID NO: 2436 - DNA, 2059 bp, Homo sapien
ctatttaaaaacccatcaccacaacagacaaaggacatattcatcatacccaaaagtttcctcatgtagcccctccctcccagtcttccttacctctccaccccaccaggcaacccctgatatgctttatgtaactatacattaatttgtatttcctagaattttatataattggaatcacacattgtatattctgttttatctggcttctttcactcagcaaaattattacgagattcactgacgttgtagcatgtatcattagttcattccttttattactgagtagtattcaactgtagggatacaccagtgattttacccattcccttattgatgaacattttggttgtttctagattttggctattgcaaataaagctgctatgaacattcatgtacaaaaaaaaacggggtcatcgacgagatggaccgcagggccaagagcgaggctcccgccatcagctccgccatcgaccgcggcgacaccgagacgaccatgccgtccatcagcagtgaccgcgccgcgctgtgcgccggctgcgggggcaagatctcggaccgctactacctgctggcggtggacaagcagtggcacatgcgctgcctcaagtgctgcgagtgcaagctcaacctggagtcggagctcacctgtttcagcaaggacggtagcatctactgcaaggaagactactacaggcgcttctctgtgcagcgctgcgcccgctgccacctgggcatctcggcctcggagatggtgatgcgcgctcgggacttggtttatcacctcaactgcttcacgtgcaccacgtgtaacaagatgctgaccacgggcgaccacttcggcatgaaggacagcctggtctactgccgcttgcacttcgaggcgctgctgcagggcgagtaccccgcacacttcaaccatgccgacgtggcagcggcggccgctgcagccgcggcggccaagagcgcggggctgggcgcagcaggggccaaccctctgggtcttccctactacaatggcgtgggcactgtgcagaaggggcggccgaggaaacgtaagagcccgggccccggtgcggatctggcggcctacaacgctgcgctaagctgcaacgaaaacgacgcagagcacctggaccgtgaccagccatacccgagcagccagaagaccaagcgcatgcgcacgtccttcaagcaccaccagcttcggaccatgaagtcttactttgccattaaccacaaccccgacgccaaggacttgaagcagctcgcgcaaaagacgggcctcaccaagcgggtcctccaggtctggttccagaacgcccgagccaagttcaggcgcaacctcttacggcaggaaaacacgggcgtggacaagtcgacagacgcggcgctgcagacagggacgccatcgggcccggcctcggagctctccaacgcctcgctcagcccctccagcacgcccaccaccctgacagacttgactagccccaccctgccaactgtgacgtccgtcttaacttctgtgcctggcaacctggagggccatgagcctcacagcccctcacaaacgactcttaccaaccttttctaatgactcgcaacccctcaccccacaatttctttaaaaaagaaattatctttagttgaattccaagtgtattttaaaatagaggctttgagcaactaactaaccacattttaggatctcgcctggaaacagaggtaaaaaaaagaagtgtgcgcccggctaatgcagcggtgtggaccgaggaacaacttggaagatctacctgcaacacaacatttgtgtcactgtacagttttgtggactgagcgaggaaaaacaacaaataatttaagttggctagagcttctgtattttcaaagactgccacgtgccttaggaatactgttttatctccatactttggatgacttgttcatttttctctccctctttttctctgtatatttatgaccagagcaaaaatgtaaaaaacaaaaaaaacaacaaaaaaagtttgttactttgaatagtcctaaaaaaaaaaaa

SEQ ID NO: 2437 - protein, 389 aa, Homo sapien
MDRRAKSEAPAISSAIDRGDTETTMPSISSDRAALCAGCGGKISDRYYLLAVDKQWHMRCLKCCECKLNLESELTCFSKDGSIYCKEDYYRRFSVQRCARCHLGISASEMVMRARDLVYHLNCFTCTTCNKMLTTGDHFGMKDSLVYCRLHFEALLQGEYPAHFNHADVAAAAAAAAAAKSAGLGAAGANPLGLPYYNGVGTVQKGRPRKRKSPGPGADLAAYNAALSCNENDAEHLDRDQPYPSSQKTKRMRTSFKHHQLRTMKSYFAINHNPDAKDLKQLAQKTGLTKRVLQVWFQNARAKFRRNLLRQENTGVDKSTDAALQTGTPSGPASELSNASLSPSSTPTTLTDLTSPTLPTVTSVLTSVPGNLEGHEPHSPSQTTLTNLF

SEQ ID NO: 2438 - DNA, 1732 bp, Homo sapien
gtcccgagcaaaaacaagtgtttgcaaacccaagtccaacccagaaatcccccgtgcagcctgtagaggacctagctgggaacttatgggagaagttacgtgaaaaaatcaggtcttttgtggcatattctatcgcaatcgatgagatcacggatataaataataccacccagttggccatattcatccgtggtgtcgatgagaatttcgatgtgtccgaagaacttctggacacggtgcccatgacgggtacaaaatctggcaacgagatctttttgcgtgttgagaagagcctgaaaaagttctgtatcaactggtcgagattagtaagcgtggcctccactggcaccccagcgatggtggatgccaataacgggcttgtcacaaaactgaagtccagggtggcgacgttctgcaagggtgcggaactgaagtccatctgttgtataattcatccggaatcactctgtgctcagaagttgaagatggaccacgtcatggacgtggtagtgaagtccgtgaactggatatgctcccggggactgaaccacagcgagttcacaaccttgctctatgagctggacagccagtatggtagcctcctgtactacacggagattaagtggctcagtcgcgggctcgtgctaaagagatttttcgaatccttggaagaaatcgactccttcatgtcatccagagggaaacccctgcctcaactgagctccatagattggatccgagacctggccttcttggttgacatgacgatgcatctgaacgctttgaacatctctctccaaggacactcccaaatcgtcacgcagatgtatgacctgatccgggcgttcctagcaaaactgtgcctctgggagactcatttgacgaggaataatctggcccactttcccaccctgaaattggtttccagaaatgaaagcgatggcctgaactacattcccaaaatcgcggaactcaagaccgaattccagaaaaggctgtctgatttcaaactctacgaaagcgaactgactctgttcagctccccgttctccacgaagatcgacagtgtgcacgaggagctccagatggaggttatcgacctgcaatgcaacacggtcctgaagacgaaatacgacaaggtgggaataccagaattctacaagtacctctggggtagctacccgaaatacaagcaccattgcgcaaagattctttccatgttcgggagcacctacatctgcgaacagctgttctccattatgaaactgagcaaaacaaaatactgctcccagttaaaggattcccagtgggattctgtactccacatcgcaacgtgatggagagaaaactcctggcagggccctatggtgggaaaggctggagtcttctagtcccaagggattgggagatgacaaaatgaattttttttttcttttttgagatggagtcttgctctgtcgcccaggttggagtgcagtggcgtgatctcggcttactgcaacttccagctcctgggttcgaacgattctcctgcctcagcctcccgagcagctgggactacaggcatggtggcacatgcctgtaatcctagctactcaggaggctgaagcataagaatcgcttgaacctgggaggcggaggttgcagtgagcagagattgcaccactgcacttcagcctgaatgacagagagagactctgtctcaaaaaaaaaaaaaaaaaaaaaaaaaaaa

SEQ ID NO: 2439 - protein, 364 aa, Homo sapien
MTGTKSGNEIFLRVEKSLKKFCINWSRLVSVASTGTPAMVDANNGLVTKLKSRVATFCKGAELKSICCIIHPESLCAQKLKMDHVMDVVVKSVNWICSRGLNHSEFTTLLYELDSQYGSLLYYTEIKWLSRGLVLKRFFESLEEIDSFMSSRGKPLPQLSSIDWIRDLAFLVDMTMHLNALNISLQGHSQIVTQMYDLIRAFLAKLCLWETHLTRNNLAHFPTLKLVSRNESDGLNYIPKIAELKTEFQKRLSDFKLYESELTLFSSPFSTKIDSVHEELQMEVIDLQCNTVLKTKYDKVGIPEFYKYLWGSYPKYKHHCAKILSMFGSTYICEQLFSIMKLSKTKYCSQLKDSQWDSVLHIAT

SEQ ID NO: 2440 - DNA, 1973 bp, Homo sapien
agcctgcgggaatccagcgcttattcgctgaccctcgagtcgcttcgctagctgtgcgccctcctgggcactagcctggagaggagcgtgcagacgcggctccttggagggagtgcggtcctctagggaggcatcgggctcctaggggcttcttggcgtgtgtggtgggattggggtccgccggccatggccttcactttcgctgcgttctgctacatgctgtctctggtgctgtgcgctgcgctcatcttcttcgccatctggcacataattgcctttgatgagttaaggacagattttaagagccccatagaccagtgcaatcctgttcatgcgagggaacggttgaggaacatcgagcgcatctgcttccttctgcgaaagctggtgctgccagaatactccatccatagcctcttctgcattatgttcctgtgtgcgcaagagtggctcacgctggggctgaatgtccctctacttttctatcacttctggaggtatttccactgtccagcagatagctcagaactagcctacgacccaccggtggtcatgaatgccgacactttgagttactgtcagaaggaggcctggtgtaagctggccttctatctcctctccttcttctactacctttactgcatgatctacactttagtgagctcttaacgcaaagaccatgcacatcatcagagactgagatgggagaggcctgagacggagaggtgcatttctgctggtgactggaggagggaccagaatgaggatacgtgagaaatagacccggcaggcagtcagactgaatgggagctggaatcacgcagcagttgggagccgagttaaccctgcgtgtctgtgtcaccctgtttgtcaatctttggcattcgaattccacacacggggtcctagagcccttctgagcatcagtggtgtgggggagtaggtgacgaaacactagacctctcctgagagagaattgctgcttcctgaatccacttcattgaacagcaccttgcaagttcaaatgagttcctgggagcggaggctggaaggccacaaggtgcttgctaaggaacagaatgacccagagtcaaggccaagtctgcagggacctgttgaaagcctcgagaatgtcttggctgcccaagactcttgttgcctttcttccaagccatggccatgccctttttctcaaatgggaggggctggagggtgtgtgggatttgtcttcagctgcaaccagccttgagcctgctgggctattttcagcgaggaggggtgaatataggaaaaatgcatttttgaaacgtttgcaacatgatcaaggtgttagttctccaccacacaagttgtattcttcttttgccacctcaaaccatcacagagtctttaaatgcaaatcaattggtcaatgctagtcaaagctatgttcttacaaaaaccccagacagctcagagctcagaaaatcctgtggagtggctgctctgtaccgtgggcatccggcagccaggaagtgagacaacataattataactttgttttatgatgctgcatcatttgtactgtttaggtcgacgtgaggacatcatcttatttagaattttccgtttggcattctcttttgggtgggagttatgctgggggttgtaaataatgacaaggctgagatttttatgatgtttaaattgggcacaatgattttgaccttattccccaaacttcttttcttttctactgtttaacatacacaggctatttatacacgtccccagctcccatctgaaacctgtgactcaggtttatgaatggtgtttgtgtagcaacacattgtgtgctatgtttattaaaatgcagcgacaaaaaaaaaaaaaaaaaaaaaaaaaaaaaaaaaaaaaaaaaaaaaaaaaaaaaaaaaaaaaaaaaaaaaaaaaaaaaaaaaaaaaaaaaaaaaaaaaaaaaaaaaaaaaaaaaa

SEQ ID NO: 2441 - protein, 160 aa, Homo sapien
MAFTFAAFCYMLSLVLCAALIFFAIWHIIAFDELRTDFKSPIDQCNPVHARERLRNIERICFLLRKLVLPEYSIHSLFCIMFLCAQEWLTLGLNVPLLFYHFWRYFHCPADSSELAYDPPVVMNADTLSYCQKEAWCKLAFYLLSFFYYLYCMIYTLVSS

SEQ ID NO: 2442 - DNA, 1798 bp, Homo sapien
gtgccaaccaaaccctgaacagaggaggtggcggtggtggccctcgcctgtggcccccgtgctgcttgcactcgaactcgtcgccatggaggagctccaggagcctctgagaggacagctccggctctgcttcacgcaagctgcccggactagcctcttactgctcaggctcaacgacgctgccctgcgggcgctgcaagagtgtcagcggcaacaggtacggccggtgattgctttccaaggccaccgagggtatctgagactcccaggccctggttggtcctgcctcttctccttcatagtgtcccagtgttgtcaggagggcgctggtggtagcttggaccttgtgtgccaacgcttcctcaggtctgggcctaacagcctccactgcctgggctcactcagggagcgcctcattatttgggcagccatggattctatcccagccccatcatcagttcagggacacaacctgactgaagatgccagacatcctgagagttggcagaacacaggaggctattctgaaggagatgcagtatcacagccacagatggcactagaggaggtgtcagtgtcagatccactggcaagcaaccaaggacagtcactcccaggatcctcaagggagcacatggcacagtgggaagtgagaagccagacccatgttccaaacagagaacctgttcaggcactgccttcctctgccagccggaaacgtctggacaagaaacgttcagtgcctgtagccactgtagaactggaagaaaagaggttcagaactctgcctttagtgccaagccccctacaaggcctgaccaatcaggatttacaagagggagaagattgggagcaagaagatgaggacatggaccccagattagaacacagttcctcagttcaagaagattctgaatccccaagtcctgaagatataccagactacctcctgcaatacagggccatccacagtgcagaacagcaacatgcctatgagcaggactttgagacagattatgctgaataccgcatcctgcatgcccgtgttgggactgcaagccaaaggttcatagagctgggagcagagattaaaagagttcggcgaggaactccagaatacaaggtcctggaagacaagataatccaggaatataaaaagttcaggaagcagtacccaagttacagagaagaaaagcgtcgctgtgagtaccttcaccagaaattgtcccacattaaaggtctcatcctggagtttgaggaaaagaacaggggcagctgaagttatcaagggaatttttgagcctctgcttagtgaaacacaaaggaacaaagcagctataaactaaatagaatgcaactatctgcttttcttatgctgaccactggagtccatggtggcaagtagagagctgctctaggttcttgaggtttggttttcattattaatttttagggtatgggcactgtgcaaagactccatagctgtgcctaggagtctaggaaaagtgacagaggcttggcttttttacctttagttcagccaagtcattttcaagtcctgagaaatgacatcatcttcaggataaaataatgaggacattagacaaaccaaactaagtgaattttagcctggtagcctctctaaggaaacagtaataataacttctgataagagttaaaagaacttgtagcatacctggatataatgggaaagggcctgggtgttacccatgtactgaaaatgaacttttaccaacatggctaaaaaattaaaaaaaaaaaaaaaaaaaaaaaaaaa

SEQ ID NO: 2443 - protein, 397 aa, Homo sapien
MEELQEPLRGQLRLCFTQAARTSLLLLRLNDAALRALQECQRQQVRPVIAFQGHRGYLRLPGPGWSCLFSFIVSQCCQEGAGGSLDLVCQRFLRSGPNSLHCLGSLRERLIIWAAMDSIPAPSSVQGHNLTEDARHPESWQNTGGYSEGDAVSQPQMALEEVSVSDPLASNQGQSLPGSSREHMAQWEVRSQTHVPNREPVQALPSSASRKRLDKKRSVPVATVELEEKRFRTLPLVPSPLQGLTNQDLQEGEDWEQEDEDMDPRLEHSSSVQEDSESPSPEDIPDYLLQYRAIHSAEQQHAYEQDFETDYAEYRILHARVGTASQRFIELGAEIKRVRRGTPEYKVLEDKIIQEYKKFRKQYPSYREEKRRCEYLHQKLSHIKGLILEFEEKNRGS

SEQ ID NO: 2444 - DNA, 2229 bp, Homo sapien
aatgaaccaaattcacaatcaaaatttccaatttttcggtttccttcatcattctcttctcccgttggaatggtatttcatccccgaagccactttttgtatgcttatggcaatcaggaatgggaagatacagtgcagtcggaagtgttactgagagaattttcacattatactatgatcacttgggattcctacataagctgactctgggtcgctttgaagctagtggaccacccacagcctttggaaattctagaaatctttttggacagcctccagatatgggctttgagactgcgcttgccccacagcacacctccttagatgaaattatcttttttgcatatgtacctgagaacgaaccccaggaaacgatctacagcaagaagttcggcaatatacactatggaaaagtgatacactctgggaaaactggaagagcttacataagaaaggtattgcaacatacgactcctaaaggatttttgtcctcagttattgcagaaatgaaagagccctttggattagaagaagtgaatgagagctcttgtttgtctagttcccttttgattaataaagctggaaatgtctataaactcactcttgattcacaagttgttcaggccttgtttgaagatacagatatagagaagactgtagtgcttcccgggtacagcagcttcctcatcacaagcattttagataataagaatgcattagccattgctaccatgcctgaaagtgcacccaacaatatgacctttctaaagagcacatggttcttatacaactttgggcaaaggaatggacgaacatggaaaatatattcaaaaccatgtaattattggtttcaacatgatgattcaccatccctcaacattgtgaaatacattgatctgggaaactcttatgttttaaaagctaaggtcatacggaatgcaaaaggttttcgaatgcttgaaataccactactgactgtgtttgttggaaaccctaatttgttggaagttacagctgaagtcacttttgatgatactgacagttatgtaataacaatttctgcagctagcaaagttttacatcagggttcaacttcactggcatttattatgtggtcagcctctactgagtgctttgttacgacaatggtgccaacactgaaaagcagctgtagttatctcagatctatgcatcacattcctagcaaatttatcccatttgaagactggattagtggagttcataaagacagtcagggttttaacctcatcaaaactttgccgataaactacaggcctccatctaatatgggaattgctattccactcacagataatttttatcatgcagatcctagcaaacccataccaagaaacatgtttcacatgtcaaagaaaaccggtaaattcaaacagtgtgctaatgtttccactcgggaggagtgtaactgcacaaaggatcagaagttttcacatgctgttgctttctcggattgcagggaaaaagttcctcgctttaagtttccaattacacaatatccagtttctttggaaattatcaacgaggatggacgtgtcccattgcaatctccatatctggttactgtgactgaagtgaacatgaggcacaactggaaactgaaacacactgtgccagaaaatattaaaagaatgaaacaattagtagaaccaattcttggtgctgcagtgtataatccttcaggtctcaacttaagcataaagggctctgaacttttccactttagagtgaccgtcatttcaggagtaactttttgtaacttaattgaagaatttcagatttatgttgatgaggcaccattgccattcccaggacacacgcttattgccgtggcaacagcggtagtgctagggggattaatttttatagcatttatgtttcaactgcaaggcatccatccgtggaggacattccaaagatggattagaagaaaccaagagaagttttcaagtatctctctcagtgagctgattcatagatcaaagtctgaagagtgaacacatggtgatcataatttctctttattttctagttttatcagccaattcctagaacaatatatttaaatgttaaatatgcaagctacataaaatcctaaagaattgtcattataattcaaactgctacttgtcaatatattcaccatttccttttcttattttgaatacatagaaaatgtcttatgccagg

SEQ ID NO: 2445 - protein, 638 aa, Homo sapien
MGRYSAVGSVTERIFTLYYDHLGFLHKLTLGRFEASGPPTAFGNSRNLFGQPPDMGFETALAPQHTSLDEIIFFAYVPENEPQETIYSKKFGNIHYGKVIHSGKTGRAYIRKVLQHTTPKGFLSSVIAEMKEPFGLEEVNESSCLSSSLLINKAGNVYKLTLDSQVVQALFEDTDIEKTVVLPGYSSFLITSILDNKNALAIATMPESAPNNMTFLKSTWFLYNFGQRNGRTWKIYSKPCNYWFQHDDSPSLNIVKYIDLGNSYVLKAKVIRNAKGFRMLEIPLLTVFVGNPNLLEVTAEVTFDDTDSYVITISAASKVLHQGSTSLAFIMWSASTECFVTTMVPTLKSSCSYLRSMHHIPSKFIPFEDWISGVHKDSQGFNLIKTLPINYRPPSNMGIAIPLTDNFYHADPSKPIPRNMFHMSKKTGKFKQCANVSTREECNCTKDQKFSHAVAFSDCREKVPRFKFPITQYPVSLEIINEDGRVPLQSPYLVTVTEVNMRHNWKLKHTVPENIKRMKQLVEPILGAAVYNPSGLNLSIKGSELFHFRVTVISGVTFCNLIEEFQIYVDEAPLPFPGHTLIAVATAVVLGGLIFIAFMFQLQGIHPWRTFQRWIRRNQEKFSSISLSELIHRSKSEE

SEQ ID NO: 2446 - DNA, 1594 bp, Homo sapien
aaaagtccttccctaagactatgtctaagacatacattaaacaagcaaacaaataatatatcacatataacacagcctagcaaagagtaggtactctcattacctactatttctcgctcacattttctccctaaaatgagtgttatttttatgataatttgttctgtacccttcatgcaaacaatctttgaaattcttattcccaatgtgatgtggaatgacttgttccatcattccttagcaaggttaaggtactccagtaaatattttccttttcttagatatagatgtggtaagatgttaaaaggaggtggtttgtggcaaggcaatgttttaaaatttaactttttgttaacattttaaaatgtaaataaaaataatttcctgggttttggaaaactaagatttggagacattagacccacattcttttaagtaaagcacttcgttcatatagattgcccagcccctgtaggcatttgaatttactaccttggcttaagtacagtcttgcaaactctgtcccctacactcttctaggtcaggggagataagaaggagagggaagaactaagttatgatgaaagcagccataagaagggggcagaaatggggtcatttgacccttcgtcttctcaaatcagaaactcattgtgtggctgtgcctttaaattaaccatttactttcatggagttacttcaattgctcttctaagacataaatgagatgcctgtttctttatattcttaccctgtgtagtacttgctggtggtggaaagccatgctacctccctgaattcccaggattgtgatgcaaggtctaatgcagtagttctccaagtgtggtctgtagaccttatggggtggggggtccctgagaccgtttcagggagttcacaggtcaaacaattttaataataaagctaacgtgttatttgatcttttcactgggctgacatttgcactgatggtgccaaagcaatgttatgtaaaactgctgatgttttgggcaccaaactggaacaaaaccttatattctttaccactaagcatctgccggttaaaaaaaaaaaaaagaagtttaccttaagaatgtccatccatgatgaagtggtaacaatttttattaaatctcaatcctgaaattcttaagtacttttttagatttctttttgatgttctgtgtgaagaaaaagtattcctactacatatcaaagtgagaaactgtgcttgtgctattgagttgcaagttaaactagccttttaaaaaatgaaacataatggacgatgtggtggctcacgcctgtaatctttgggaagctgaggcgggtggatcacgaggtctggagattgagaccatcctggccaacatggtgaaaccccgtctctactaaaaatacaaaaattagctgggcgtagtggtgcatgcctgtaatcccagctacttgagaggctgaggcaggagaatcgcttgaaccagggagtcggaggttgcagtgaatcaagatcacgccactgcactccagcctgacgacagagcgagactctctcaaaaattaataaataaataaataataaaaaaaaaaaaaaaaa

SEQ ID NO: 2447 - DNA, 1327 bp, Homo sapien
cagcgccacagccccccaacaataaaccttcccttaaatgctgtagtaagctgtattttctaaagatgaccacctcaatatatttattctgtttaatactttctttctacaacatgatacatgctcctccaactgacagaaggggacatattctctccctgtaagtctaggaggagatttttaacagtcttgtctaatagagtacagcagaagtgatgctaaataactccggaggcagggtcataaaaaaacccagtgataatattaaaaccacatgtgaatgttccagctggacccccagcaggtacaagcattaactaaaaaatggcatgaacaagctttcatatgactccagcctcagtctttgagtcttctagctgaggcctcagacatcatggagcagaaacaagtccttatctgaattactcacccacacaaaccatgagatataataaattataattgttgttttaaggtactatattttataacaaaatattaagcagcagtagagaactaaagcatagaaaaatctcaaattaacaacctaacatcacacctagagaaaccaaaaaaacaagagcataccaactccgaagctagcagaagacaagaaataactgaaatcagagctgaattgaatgaaattgagtcacgaaaaaccatacaaaagatcaacaaaaccaaaagctggccctttgaaaaaaatgaataagattgatagaccactaggtagactaataagtaaaagagagaagatccagggccaggcacagtggctcacacctgtaatcccagaactttgggaggccaagatgggcagatcacctcaggtcgggacttcaagaccagcctgaccaacatggagaaaccctgtctttactaaaaatacaaaattagccgggtatggtagcacatgcctgtaatcccagctactcaggaggctgaggcaggagaatcgcttgaacccaggaggcagaggttgtggtgagctgagatggtgccattgcactccagcctgggcaacaagactgaaatttcgtcaaaaaaaaaaaaaagaaagaaagaaggaaggaaggaagggaaagaagagagaatattcaaataaacacaatcacaacacacaaaggggacattaccagcaaccccacagaaatacacaaaaccctcagagattattacaaatatcactatgtgcacaaactaaaaaacctagaagaaatggataatttcctgaaaatataaaacaacccaagattgaaccaggaagaaattgaaaccctaaacagacaactaacaaattgtgaaattgaatcagtaaaaaaaa

SEQ ID NO: 2448 - protein, 71 aa, Homo sapien
MKLSHEKPYKRSTKPKAGPLKKMNKIDRPLGRLISKREKIQGQAQWLTPVIPELWEAKMGRSPQVGTSRPA

SEQ ID NO: 2449 - DNA, 1086 bp, Homo sapien
atgtgggtgcttacacctgctgcttttgctgggaagctcttgagtgtgttcaggcaacctctgagctctctgtggaggagcctggtcccgctgttctgctggctgagggcaaccttctggctgctagctaccaagaggagaaagcagcagctggtcctgagagggccagatgagaccaaagaggaggaagaggaccctcctctgcccaccaccccaaccagcgtcaactatcacttcactcgccagtgcaactacaaatgcggcttctgtttccacacagccaaaacatcctttgtgctgccccttgaggaagcaaagagaggattgcttttgcttaaggaagctggtatggagaagatcaacttttcaggtggagagccatttcttcaagaccggggagaatacctgggcaagttggtgaggttctgcaaagtagagttgcggctgcccagcgtgagcatcgtgagcaatggaagcctgatccgggagaggtggttccagaattatggtgagtatttggacattctcgctatctcctgtgacagctttgacgaggaagtcaatgtccttattggccgtggccaaggaaagaagaaccatgtggaaaaccttcaaaagctgaggaggtggtgtagggattatagagtcgctttcaagataaattctgtcattaatcgtttcaacgtggaagaggacatgacggaacagatcaaagcactaaaccctgtccgctggaaagtgttccagtgcctcttaattgagggtgagaattgtggagaagatgctctaagagaagcagaaagatttgttattggtgatgaagaatttgaaagattcttggagcgccacaaagaagtgtcctgcttggtgcctgaatctaaccagaagatgaaagactcctaccttattctggatgaatatatgcgctttctgaactgtagaaagggacggaaggacccttccaagtccatcctggatgttggtgtagaagaagctataaaattcagtggatttgatgaaaagatgtttctgaagcgaggaggaaaatacatatggagtaaggctgatctgaagctggattggtag

SEQ ID NO: 2450 - protein, 361 aa, Homo sapien; identical to SEQ ID NO: 1044

SEQ ID NO: 2451 - DNA, 2684 bp, Homo sapien
gcttccagcggacggcagcgcgcgagcattgccccccctgcaccacctcaccaagatggctactttgggacacacattccccttctatgctggccccaagccaaccttcccgatggacaccactttggccagcatcatcatgatctttctgactgcactggccacgttcatcgtcatcctgcctggcattcggggaaagacgaggctgttctggctgcttcgggtggtgaccagcttattcatcggggctgcaatcctggggacccccgtgcagcagctgaatgagaccatcaattacaacgaggagttcacctggcgcctgggtgagaactatgctgaggagtatgcaaaggctctggagaaggggctgccagaccctgtgttgtacctagctgagaagttcactccaagaagcccatgtggcctataccgccagtaccgcctggcgggacactacacctcagccatgctatgggtggcattcctctgctggctgctggccaatgtgatgctctccatgcctgtgctggtatatggtggctacatgctattggccacgggcatcttccagctgttggctctgctcttcttctccatggccacatcactcacctcaccctgtcccctgcacctgggcgcttctgtgctgcatactcaccatgggcctgccttctggatcacattgaccacaggactgctgtgtgtgctgctgggcctggctatggcggtggcccacaggatgcagcctcacaggctgaaggctttcttcaaccagagtgtggatgaagaccccatgctggagtggagtcctgaggaaggtggactcctgagcccccgctaccggtccatggctgacagtcccaagtcccaggacattcccctgtcagaggcttcctccaccaaggcatactgtaaggaggcacaccccaaagatcctgattgtgctttataacattcctccccgtggaggccacctggacttccagtctggctccaaacctcattggcgccccataaaaccagcagaactgccctcagggtggctgttaccagacacccagcaccaatctacagacggagtagaaaaaggaggctctatatactgatgttaaaaaacaaaacaaaacaaaaagccctaagggactgaagagatgctgggcctgtccataaagcctgttgccatgataaggccaagcaggggctagcttatctgcacagcaacccagcctttccgtgctgccttgcctcttcaagatgctattcactgaaacctaacttcacccccataacaccagcagggtgggggttacatatgattctcctatggtttcctctcatccctcggcacctcttgttttcctttttcctgggttccttttgttcttcctttacttctccagcttgtgtggccttttggtacaatgaaagacagcactggaaaggaggggaaaccaaacttctcatcctaggtctaacattaaccaactatgccacattctctttgagcttcagttcccaaatttgctacataagattgcaagacttgccaagaatcttgggatttatctttctatgccttgctgacacctaccttggccctcaaacaccacctcacaagaagccaggtgggaagttagggaatcaactccaaaacgctattccttcccaccccactcagctgggctagctgagtggcatccaggacgggggagtgggtgacctgcctcatcactgccacctaacgtccccctggggtggttcagaaagatgctagctctggtagggtccctccggcctcactagagggcgcccctattactctggagtcgacgcagagaatcaggtttcacagcactgcggagagtgtactaggctgtctccagcccagcgaagctcatgaggacgtgcgaccccggcgcggagaagccatgaaaattaatgggaaaaacagtttttaaaaaacaaaagaaaaaaaggtttatttacagatcgccccaggagactttccctggtgcctgcggatgtccgaggcctcgcgccagcagcgctcagtgcccttcctggagctctcctggcccaggcctggcgggcactgcttcccggcctgcgatgtcccaaggcggggaaggagtccagattgggtccccctcacaggttagtggtgatacattttaagtctgggagagcggcctgcttgtgcagtgggtcgccgaggataagaggtgagccccctctctcctggctgcagtccttggcgctttggtccagaagggtgcgaagagcgctgggccgaacatactggagactcaccacggcccctccgaggaagaggcacaggacgcctgtggcggtggggatcgaaagaaaggagggcatgtggagtcagggctatgttgcccaggctggtctcgaactctggcctcaaacgaccttcctgcctcgacctcccaaagtgctgggattacaggcgtgatgcccgggccttcttccatcttttggagcctaccccttgtgttacctcccgccacacacctctaatctgaattacatgaaacacggcaagacaccaaacccttctgagccccccacttttcatctgtaaaatggtcataacagtgcctgtttctgcgaactattgagaggggcaaatagggtaatagatgtgaattcattctgtaaactgg

SEQ ID NO: 2452 - protein, 298 aa, Homo sapien
MATLGHTFPFYAGPKPTFPMDTTLASIIMIFLTALATFIVILPGIRGKTRLFWLLRVVTSLFIGAAILGTPVQQLNETINYNEEFTWRLGENYAEEYAKALEKGLPDPVLYLAEKFTPRSPCGLYRQYRLAGHYTSAMLWVAFLCWLLANVMLSMPVLVYGGYMLLATGIFQLLALLFFSMATSLTSPCPLHLGASVLHTHHGPAFWITLTTGLLCVLLGLAMAVAHRMQPHRLKAFFNQSVDEDPMLEWSPEEGGLLSPRYRSMADSPKSQDIPLSEASSTKAYCKEAHPKDPDCAL

SEQ ID NO: 2453 - DNA, 2274 bp, Homo sapien
aacaaggtcctgggtaagtagtgggagttctccttcaggatcatgatgttcgtcagagtgaatttcagcaacttccctaccatcgaatttttatcatgcttctcttggaactcaatgcacctgagcatgtgttggaaaccattaatttccagacacttacagctttctgcaatacattccacatcttgaggcctaccaaagctcctggctttgtatatgcctggcttgaactgatttcccatcggatatttattgcaagaatgctggcacatacgccacagcagaaggggtggcctatgtatgcacagctactgattgatttattcaaatatttagcgcctttccttagaaatgtggaactcaccaaacctatgcaaatcctctacaagggcactttaagagtgctgctggttcttttgcatgatttcccagagttcctttgtgattaccattatgggttctgtgatgtgatcccacctaattgtatccagttaagaaatttgatcctgagtgcctttccaagaaacatgaggctccccgacccattcactcctaatctaaaggtggacatgttgagtgaaattaacattgctccccggattctcaccaatttcactggagtaatgccacctcagttcaaaaaggatttggattcctatcttaaaactcgatcaccagtcactttcctgtctgatctgcgcagaaccgtacaggtatccaatgaacctgggaatcgctacaacctccagctcatcaatgcactggtgctctatgtcgggactcaggccattgcgcacatccacaacaagggcagcacaccttcaatgagcaccatcactcactcagcacacatggatatcttccagaatttggctgtggacttggacactgagggtcgctatctctttttgaatgcaattgcaaatcactccggtacccaaatagccacactcactacttcagttgcaccatgctgtacctttttgcagaggccaatacggaagccatccaagaacagatcacaagagttctcttggaacggttgattgtaaataggccacatccttggggtcttcttattaccttcattgagctgattaaaaacccagcgtttaagttctggaaccatgaatttgtacactgtgccccagaaatcgaaaagttattccagtcggtcgcacagtgctgcatgggacagaagcaggcccagcaagtaatggaagggacaggtgccagttagacgaaactgcatctctgttgtacgtgtcagtctagaggtctcactgcaccgagttcataaactgactgaagaatcctttcagctcttcctgactttcccagccctttggtttgtgggtatctgccccaactactgttgggatcagcctcctgtcttatgtgggcacgttccaaagtttaaatgcatttttttgactcttggccaaaatttagaagatgctgtgaatatcattttgaacttgtgtaaatacatgaaagagaaaacctttgtctggaacttcttggctttgtgcaagctgtgtccaaggcaagtacataaactggtaccttgtaatgaagaggcagctgatgccatgcacttgtctgagggcatagctccatgtcttctgacattcctggtgtcccaaagaatagcaaaaagccagtttgaatattatgtaacttatttttttaatgtggacaggggaccttgaaaatcactaagttattaaaaatgtggatgtgctagaattggatatgtccaggaacatgggaagggctcactattggaatcccatgagtttccattttgtctctacccaaacgtattccaaagctgactgcatttgtaccatcttatttcttttggggattatacacctcagccgcctgagatgggggtcagctctttatataaagggaaaccagaccaggcctaaagcccaccccctaccctcacccccacaatcctctcctgaaacttaaaaacagtgggaatataggaaagggaaccaaatctcattaattaattgttctcccccattaccccactgaatgaatggccatacaggctaagctgaataatgacaaagttgaaaggaccaatacagccccttttataaggattttgaatgttttgcaaatgtattggtccctgtgttgtattttgtagccttttcctgggcttcagctcccctacttcttgtatgtgtatgcatactgtagctaaccattaaagtcatgacacacaaaaaaaaaaaaaaaaaaaaaaaaaaa

SEQ ID NO: 2454 - protein, 316 aa, Homo sapien
MLLLELNAPEHVLETINFQTLTAFCNTFHILRPTKAPGFVYAWLELISHRIFIARMLAHTPQQKGWPMYAQLLIDLFKYLAPFLRNVELTKPMQILYKGTLRVLLVLLHDFPEFLCDYHYGFCDVIPPNCIQLRNLILSAFPRNMRLPDPFTPNLKVDMLSEINIAPRILTNFTGVMPPQFKKDLDSYLKTRSPVTFLSDLRRTVQVSNEPGNRYNLQLINALVLYVGTQAIAHIHNKGSTPSMSTITHSAHMDIFQNLAVDLDTEGRYLFLNAIANHSGTQIATLTTSVAPCCTFLQRPIRKPSKNRSQEFSWNG

SEQ ID NO: 2455 - DNA, 2445 bp, Homo sapien
gaatcaagctcatctatgatgctggtgtctccttcatcgtcgtcctcgtggtctgggccggctgctccgggctggttttcctcaactgcttctttaactggccccttgagcccttcccggggccggaggacatggactactcggtgaagatcaagttcagctggctgggctttgaccacaagatcacagggaagcagttctacaagcaggtgaccacggtgggccggcgcctgagtgtgggcagctccatgaggagtgccaaggagcaggtggcgctgcaggagggccacaagctgtgcctgtccaccgtcgacctggaggtgaagtgccagccggatgccgcagtggtcccctccttcatgcacagcgtgttcagccccatcctgctgctcagcctggtcaccatgtgcgtcacgcagctgcggctcatcttctacatgggggctatgaacaacatcctcaagttcctggtcagcggcgaccagaagacagttggcctctacacctccatcttcggcgtgctccagctgctgtgcctgctgacggcccccgtcattggctacatcatggactggaggctgaaggagtgtgaagacgcctccgaggagcccgaggagaaagacgccaaccaaggcgagaagaaaaagaagaagcgggaccggcagatccagaagatcactaatgccatgcgggccttcgccttcaccaacctgctgctggtgggctttggggtgacctgcctcattcccaacctgcctctccagatcctctccttcatcctgcacacaatcgtgcgaggattcatccactccgctgtcgggggcctgtacgctgccgtgtacccctccacccagttcggcagcctcacgggactgcagtctctgatcagcgcgctcttcgcccttctgcagcagccgctgtttctggccatgatgggtcctctccagggagaccctctgtgggtgaacgtggggctgctccttctcagcctgctgggcttctgcctcccgctctacctgatctgctaccggcgccagctggagcggcagctgcagcagaggcaggaggatgacaaactcttcctcaaaatcaacggctcgtccaaccaggaggccttcgtgtagtggctgccgcctcggaactgcggtctcctgcctgtgcttcagtgactgacccctgtcctgcccctccagagtaccccacgcacccccaggaccttcgccgtctccgtgccagcgttcacgctccctcccggggccctgcctcggagctctgtggtggaaggacgggagagggccccggacacgcgcgttttctcctgccgaacgcaggggctgccctgactttgctctgccgccccccggggacccggggcctggggtctctgtggtgcctgcagcaggagccaggaacgcccggcaggcaggcgctctcccgccagtgtctggattctgcctcttgccaaagcagagggggctgccatcccctgcctgccacctgcccctcggctgcatgcccacagccgtacctgcctgaggacaaaggcttgcactgtctcgcccgcgcctggcccccaccccctccccggccagcctgaggctgcctgaggaaggaaggacccgcttcctgttgtcggtgctaattcctttgtaattccagccccctgtcgcctgtccagggcctgcccacccgttggaggccggtggagaagccccacctggcttatgccctggagagggtttagcgggctgggtggacccctcgcctcctccccgagggccaatgccgcggacacgttttcactgtcaccctcgttctgtctgccacctgaagggaatttgaggaccgccgccagggcaccccgtacatacacacagctgcttttgtggaggtggacgaaaggctgtggccggcagacgtggaggtccaggccggggtggggacgtgggtgggtccgaggggtgtgtggggtcggggtgggctctaggagttagcccttatccccactgaccaggcgggagccgccaggcctgcagctgggccagtgcccaggagccatcctggcgtggggccaggagcttgtccaaggccacaggcccacagcaccccctgccggcgggctccgtggggccctggagctgatgacgggggaggcccgtccgcctggcccaccaacccgcccaccttgactgcccccagaagtgtgtcttgagacctcctgggcgtgcttagaggggtgagttgtgtttggatttttagttattttctcttcagttttattagacttcttttttataaagcaataaatccattttcctccgggtaaaaaaaaaaaaaaaaaaaaaaaaaaaaaaaaaaaaaaaaaaaaaaaaaaaaaaaaaaaaaaaaaaaaaaaaaaaaaaaaaaaaaaaaaaaaaaaaaaaaaaaaaaaaaaaaaaaaaaaaa

SEQ ID NO: 2456 - DNA, 3811 bp, Homo sapien
tttgcctaaggggataaggaaaaataatgtgaaagttgcagtccttatcagaagtaattgtttgcctaaggggataaggaaaaataatgtgaaagttgcagtccttatcagaagtaattgattagaattcagcaatgaatatgccaaatcgtacttatttcagatgatgcagccaacacgaacggttgtcatgtgtaacacaactttcgatcaccgcgaaaacaccgtcctgggaaagcgtccatgcttgatatcgtttggttcatgaacattaagtttccagtacaggtaaaatcccagaggaatccaaagccctctctttattggctcctgctccaaccatgacaagtctgatgcctggtgcaggattgcttccaataccgaccccaaatcctttgactactcttggtgtttcacttagcagtttgggagctataccagcagcagcactagaccccaacattgcaacacttggagagataccacagccaccacttatgggaaacgtggatccttccaaaatagatgaaattaggagaacggtttatgttggaaatctgaattcccagacaacgacagctgatcaactacttgaattttttaaacaagttggagaagtgaagtttgtgcggatggcaggtgatgagactcagccaactcggtttgcttttgtggaatttgcagaccaaaattctgtaccaagggcccttgcttttaatggagttatgtttggagacaggccactgaaaataaatcactccaacaatgcaatagtaaaaccccctgagatgacacctcaggctgcagctaaggagttagaagaagtaatgaagcgagtacgagaagctcagtcatttatctcagcagctattgaaccagagtctggaaagagcaatgaaagaaaaggcggtcgatctcgttcccatactcgctcaaaatccaggtctagctcaaaatcccattctagaaggaaaagatcacaatcaaaacacaggagtagatcccataatagatcacgttcaagacagaaagacagacgtagatctaagagcccacataaaaaacgctctaaatcaagggagagacggaagtcaaggagtcgttcgcattcacgggacaagagaaaagacactcgagaaaagatcaaggaaaaggaaagagtgaaagagaaagacagggaaaaggagagagagagggaaaaggaacgtgaaaaagaaaaggaacggggtaaaaacaaagaccgggacaaggaacgggaaaaggaccgggaaaaagacaaggaaaaggacagagagagagaacgggaaaaagagcatgagaaggatcgagacaaagagaaggaaaaggaacaggacaaagaaaaggaacgagaaaaagacagatccaaagagatagatgaaaaaagaaagaaggataaaaaatccagaacaccacccaggagttacaatgcatcgcgaagatctcgtagttccagcagggaaaggcgtaggaggaggagcaggagttcttccagatcgccaagaacatcaaaaaccataaaaaggaaatcttctagatctccgtcccccaggagcagaaataagaaggataaaaagagagaaaaagaaagggaccacatcagtgaaagaagagagagagaacgttcaacgtctatgagaaagagttctaatgatagagatgggaaggagaagttggagaagaacagtacttcacttaaagagaaagagcacaataaagaaccagattcaagtgtgagcaaagaagtagatgacaaggatgcaccaaggactgaggaaaacaaaatacagcacaatgggaattgtcagctgaatgaagaaaacctctctaccaaaacagaagcagtataggaccgacaagtgtacctctgcactcaatgctggaatcaaatccaaagcttttaattctctcaacaagatgtaaacaggaaagaaatctagttgagcatgaagataggatctaacagcttttccagttgttagatgactttgtggccatcttgttattgagtaagaaaataaagcatggacatcatgaaaataacagatgttacccaaactcatcttctaaaatctgtgcatttccatggtggctgacacacttgtcatgtggtctgttagtgtttgccaagaaccattgcaaataaattgaacatcaaagatccaagtttgtactatccctaaagactggagataagcattggaggctcttttaaaaaatgctagttactgaattttgtattgttttacttttttttttatttcaatatatacagtttgatgatgtgcttgaaattggtgcaaatatatacacacccttgtaagtgcaaagtatgtaagaagttttaacatttacttcacaggacttgtgattgtgttaaattctcactattgtgttttcttttgctcactgtttaggacaatttttctttaaaatagttttgcagattaaaattgcttaaataagtggattaaaaaactgacaatgcatgctactgttctctttcaaaaggaagagcaaccgtgttgaatactaataatgatgaattagtattcagtgtttagaatcattgggactacccacaaagtgagcatttctttttaaattttcttgacatttccaagcttattatgaataatattgcagtgtgtcttgtcagctgtaggtggcaaaggtgcccttataaaaaaggaaactggcttttcaaaatgggctatgggagcacaagctgaagctttagtgccttctacaatgtggtatactgttttctagaattttatatgtgctagtcattctcaattcatatggaatctagatggatatttcatgcatacccatagagaagtgtgtaagtgatatgtcagaagagcttcttactgatttcacctaaaatgagaaggaagtcctgttttcaagaatgacattagagtcatgcagctttgggaccatcagttttatactgtgataattgaaaatgaaacatgttcttattttccttaaattgaagaaaaccctttagttgtctacattggatggccttattacctctcaatcatcttttcataaatgatgtgcagaaattgtacttaaggacttaggagtatatgggaggttattggttttatgtttaaggatacgtttacttgagtttaagatacaggtcatccatcattcttaggctcactttttacagaaagtatgcaaatagtaaagtgacagcactgctaatgtttttccccagtactataacttgtggtttctgaactcattattgttgtatttccaaaaaagtaataccttttaattagtgtattaaaagttaagtataattattttaatgcaatctaatacaatcagattactcagttgccttacctcatgggaagagttacttttttagatctaaaaagctgaatagcatgttagttacttggtttcaacttgagttttcttttaatgttaataagattgaaactttagtatttagtggggaatggaaagagttgcccttgttgcaagtaatgaagcctgatttgattatgaagctgcttaatcactcttcatgtgttcagaattactgttttttttgtttgtttttcctttttgtcactgtgtacattaaaattttggaagatgctttactatgtaaagtatagatggtcattttaatcattcagccacatacggttggctggtaaacagcttattctgatacaagaatgcttgggtgcatatggaaagattgtgaaagagtgtgtcttgcatcaacagctgtcttatttatgatatataa

SEQ ID NO: 2457 - protein, 508 aa, Homo sapien
MTSLMPGAGLLPIPTPNPLTTLGVSLSSLGAIPAAALDPNIATLGEIPQPPLMGNVDPSKIDEIRRTVYVGNLNSQTTTADQLLEFFKQVGEVKFVRMAGDETQPTRFAFVEFADQNSVPRALAFNGVMFGDRPLKINHSNNAIVKPPEMTPQAAAKELEEVMKRVREAQSFISAAIEPESGKSNERKGGRSRSHTRSKSRSSSKSHSRRKRSQSKHRSRSHNRSRSRQKDRRRSKSPHKKRSKSRERRKSRSRSHSRDKRKDTREKIKEKERVKEKDREKEREREKEREKEKERGKNKDRDKEREKDREKDKEKDREREREKEHEKDRDKEKEKEQDKEKEREKDRSKEIDEKRKKDKKSRTPPRSYNASRRSRSSSRERRRRRSRSSSRSPRTSKTIKRKSSRSPSPRSRNKKDKKREKERDHISERRERERSTSMRKSSNDRDGKEKLEKNSTSLKEKEHNKEPDSSVSKEVDDKDAPRTEENKIQHNGNCQLNEENLSTKTEAV

SEQ ID NO: 2458 - DNA, 1759 bp, Homo sapien
aagacagtgaacccaaaagaattgaaaacaggatgctgcccatcacagaccgcctgctgcacctcctggggctggagaagacggcgttccgcatatacgcggtgtccacccttctcctcttcctgctcttcttcctgttccgcctgctgctgcggttcctgaggctctgcaggagcttctacatcacctgccgccggctgcgctgcttcccccagcctccccggcgcaactggctgctgggccacctgggcatgtaccttccaaatgaggcgggccttcaagatgagaagaaggtactggacaacatgcaccatgtactcttggtatggatgggacctgtcctgccgctgttggttctggtgcaccctgattacatcaaaccccttttgggagcctcagctgccatcgcccccaaggatgacctcttctatggcttcctaaaaccttggctaggggatgggctgctgctcagcaaaggtgacaagtggagccggcaccgtcgcctgctgacacccgccttccactttgacatcctgaagccttacatgaagatcttcaaccagagcgctgacattatgcatgctaaatggcggcatctggcagagggctcagcggtctcccttgatatgtttgagcatatcagcctcatgaccctggacagtcttcagaaatgtgtcttcagctacaacagcaactgccaagagaagatgagtgattatatctccgctatcattgaactgagcgctctgtctgtccggcgccagtatcgcttgcaccactacctcgacttcatttactaccgctcggcggatgggcggaggttccggcaggcctgtgacatggtgcaccacttcaccactgaagtcatccaggaacggcggcgggcactgcgtcagcagggggccgaggcctggcttaaggccaagcaggggaagaccttggactttattgatgtgctgctcctggccagggatgaagatggaaaggaactgtcagacgaggatatccgagccgaagcagacaccttcatgtttgagggtcacgacacaacatccagtgggatctcttggatgctgttcaatttggcaaagtatccggaataccaggagaaatgccgagaagagattcaggaagtcatgaaaggccgggagctggaggagctggagtgggacgatctgactcagctgccctttacaactatgtgcattaaggagagcctgcgccagtacccacctgtcactcttgtctctcgccaatgcacggaggacatcaagctcccagatgggcgcatcatccccaaaggaatcatctgcttggtcagcatctatggaacccaccacaaccccacagtgtggcctgactccaaggtgtacaacccctaccgctttgacccggacaacccacagcagcgctctccactggcctatgtgcccttctctgcaggacccaggaattgcatcggacagagcttcgccatggccgagttgcgcgtggttgtggcactaacactgctacgtttccgcctgagcgtggaccgaacgcgcaaggtgcggcggaagccggagctcatactgcgcacggagaacgggctctggctcaaggtggagccgctgcctccgcgggcctgagcgtgggcgcgcccctgcggctcccgagggtccaggccccgcccccaaaggaccaggactcgccccaaagatcccgagggcataggcacccccctcgaagttcaggttagctcctggatgacaggcaccgc

SEQ ID NO: 2459 - protein, 541 aa, Homo sapien
DSEPKRIENRMLPITDRLLHLLGLEKTAFRIYAVSTLLLFLLFFLFRLLLRFLRLCRSFYITCRRLRCFPQPPRRNWLLGHLGMYLPNEAGLQDEKKVLDNMHHVLLVWMGPVLPLLVLVHPDYIKPLLGASAAIAPKDDLFYGFLKPWLGDGLLLSKGDKWSRHRRLLTPAFHFDILKPYMKIFNQSADIMHAKWRHLAEGSAVSLDMFEHISLMTLDSLQKCVFSYNSNCQEKMSDYISAIIELSALSVRRQYRLHHYLDFIYYRSADGRRFRQACDMVHHFTTEVIQERRRALRQQGAEAWLKAKQGKTLDFIDVLLLARDEDGKELSDEDIRAEADTFMFEGHDTTSSGISWMLFNLAKYPEYQEKCREEIQEVMKGRELEELEWDDLTQLPFTTMCIKESLRQYPPVTLVSRQCTEDIKLPDGRIIPKGIICLVSIYGTHHNPTVWPDSKVYNPYRFDPDNPQQRSPLAYVPFSAGPRNCIGQSFAMAELRVVVALTLLRFRLSVDRTRKVRRKPELILRTENGLWLKVEPLPPRA

SEQ ID NO: 2460 - DNA, 663 bp, Homo sapien
  Unsure 574, 594: Unknown base
cccgccgcatccacgccatgtccccggacacgaagctgatcgtggtggtgcggaaccccgtgacccgggccatctccgactatacccagacgctctccaagaccccgggcctgcccagcttccgcgccctggccttccgccacggcctgggccccgtggacacagcctggagcgccgtccgcatcggcctgtacgcccagcacctggaccactggctgcgctacttccccctgtcccacttcctgttcgtcagcggggagcgtctggtcagcgacccggccggagaggtcggccgcgtgcaggacttcctgggcctgaaacgggtcgtcacggacaagcacttctacttcaacgccaccaagggcttcccctgcctcaagaaggcccagggcggcagccgtccccgctgcctgggcaagtccaagggccggccacacccacgcgtgccccaggccgtggtccggcgcctgcaggagttctaccggcccttcaaccgcaggttctaccagatgacgggccaggacttcggctggggctgagcggcaccctggggatgctcagcaccttgattganacccgctcgcctggccagancgggctgcgtgcacatgctgggcagagaggaatatttaagaaataaagcttggacccagatttttccac

SEQ ID NO: 2461 - protein, 212 aa, Homo sapien
  unsure 191, 198: unknown amino acid
  Unsure 574, 594: Unknown amino acid
PPHPRHVPGHEADRGGAEPRDPGHLRLYPDALQDPGPAQLPRPGLPPRPGPRGHSLERRPHRPVRPAPGPLAALLPPVPLPVRQRGASGQRPGRRGRPRAGLPGPETGRHGQALLLQRHQGLPLPQEGPGRQPSPLPGQVQGPATPTRAPGRGPAPAGVLPALQPQVLPDDGPGLRLGLSGTLGMLSTLIXTRSPGQXGLRAHAGQRGIFKK

SEQ ID NO: 2462 - DNA, 2446 bp, Homo sapien
cgcgactgcacctccaagcggcccggaacccgcggcttccctggctcccgtgagcatctcaccgggcggcactggccagcgccagccctcgggccggcccggatgaccagactcctgtagacacccgccgccctctcccggctcggcgcagccgccgcccgcgcgcgactcgccccgggaccccgcacaggttgaagaaatatggagatcaacacaaaactgctcatcagtgttacctgtatcagctttttcacctttcagcttcttttctactttgtaagttactggttttcagcaaaagtttccccaggtttcaatagtctcagcttcaaaaagaagattgaatggaactcaagggtagtatccacatgccattctttggtggttggtatttttggcctgtacattttcttattcgatgaggctactaaagctgatccactttggggtggtccatcacttgcaaacgtgaatattgctattgcctcaggctacctcatttctgatttgtccattataattttgtattggaaagtgattggtgacaaattttttataatgcatcattgtgcgtccctgtatgcatactaccttgtactgaaaaatggagtgctggcatacattgggaattttcgcctgcttgcagagctttccagcccgtttgtgaatcagcggtggttctttgaagctctgaagtatcccaagttttctaaagctatcgttatcaatggaatactcatgacagtagtattcttcatcgtgcggattgcctcaatgcttcctcattatggcttcatgtattccgtgtatggaacagaaccctacataaggcttggagttttaatccagttatcctgggtcattagttgtgttgttttggatgtgatgaatgtcatgtggatgatcaaaatttcaaaaggttgcatcaaagtcatctctcacatcagacaagagaaagccaaaaatagtcttcagaatggaaaacttgattaaaagagtgctaccgataagcaaacttcattactacccagcatatctgctgataggatgaattcttggcatgtttttgtgtacctttcttaattataattgttattcaggatttcagtgtcattttttttaaaccttagaaaagagaaggccgggcacggtggctcatgcctgtaatcccagcactttgggaggccaaggtgggtcgatcactgaggtcaggagttcgagactagcttggccaacatggtgaaacctcatctctactaaaaatacaaaaaaaagtagctgggcgtggtggttggcgcctgtaatcccagctactcgggaggctgaggcaggagaatcgcttgaacccgagagacggaggttgcagtgagctgatattgtgccactgcactccagcctgggcgacagagcaagactctgtctcaaaaaaaaaaaaaaaaaagagagaaactaaaattaaaatttagttttcatcccaagatgtcttttctgcctttcttttgccttatttacaagcatggataaaaatcttaaaggtttaaataaaaatgatcaatataatggtgaatcttttgagaaatctcttaactgcattggtattttttctctgtgaaagatgactatgataatctggtacaaatggttttatgtcaccaattttgctgcaagaatgggaactgcttttaaatctgtaaatagctcttaacatttgttgtatgcactcttttcttactatggctgtcaacacttgtgtagggtttaatttctaaattgttggcatgttctttttctcaggctattcagaagtaacaacatttttcatttcagacatgcaatcacctattaatgatgaaatattttaccactttgggaatatttaattagtttagtcatggagaatacttcccacattttaagatttttcaaatatcactgtcatttctattttagcattttatcaaattattgcttttttattttataataaggcttaagacagattatagacctccttaagagatgagtttcttcttctaaaaatgcatgttgatagaggactatttaggctaatcggaggaatcattaagaaagaaagttttaacactgtttatccctatctgctttccttgcactttttctgtgaaaaatattttctgtttgcaaaatcttccctgagttctgaacccagcaccatcagtaccaaagtcttatgcaatatgtatttattatgctcctgaaataggcctcttcttgatgagacccaaactattacaaaaatatcagtattcatattttactcacaattcatacccgtgcttacttagttggcattttagtgctttgaatttctatcttaaagcacagaaaaaaaaaggtaatttaatccaagtattctatcatcaaaattattgtctgattatatgaagataaatgactggcgactctg

SEQ ID NO: 2463 - DNA, 554 bp, Homo sapien
tttcctttcacacagcagcatcatttatctggtagtagcaagacagccgtatgactttttgttgttgttaaagaaaaataagttgtcaagatttgcctaccaataactttcctatgtcttggctttcatgtccagtgggctagtttccaactgtttgagactcagggtaatcccagaaacctgtgaagcatcggcacaaaggttgtagcgcagatgccaacagatgtgtaggtaacaaacttgtaaggcacttcaatctccagtctccgcctggcctccttgttcctggtgaccaccttgaaccatgagtataatacttgcagtgagagattttgtacaagctgacgaaccaagaggatcaacacaattcccactgcaaatttggtcagacccaaaactaacatgtaggtggtgagcggtgggatgttctgaataacagggagagattcagcgggcttggatacaagctggaagaaatggttgatccagaatcctatggtcactccagccccggcagccagaatggtggtggtgtccgcccgggttgggctgta

SEQ ID NO: 2464 - DNA, 2824 bp, Homo sapien
cccgagccccgcccctccgggcccgggtcggcgcgcccagcctgccagccgcgctgctgctgctcctcctgctgtgggaccgctgaccgcgcggctgctccgctctccccgctccaagcgccgatctgggcacccgccaccagcatggacgctcgccgcgtgccgcagaaagatctcagagtaaagaagaacttaaagaaattcagatatgtgaagttgatttccatggaaacctcgtcatcctctgatgacagttgtgacagctttgcttctgataattttgcaaacacgaaacctaaattcaggtcagatatcagtgaagaactggcaagtgttttttatgaggactctgataatgaatctttctgcggcttttcagaaagtgaggtgcaagatgtattagaccattgtggatttttacagaaaccaaggccagatgtcactaacgaactggccggtatttttcatgccgactctgacgatgaatcattttgcggtttctcagagagtgagatacaagatggaatgaggctgcagtcagttcgggaaggctgtaggacccgcagccagtgcaggcactctggacctctcagggtggcgatgaagtttccagcgcggagtaccaggggagcaaccaacaaaaaagcagagtcccgccagccctcagagaattctgtgactgattccaactccgattcagaagatgaaagtggaatgaattttttggagaaaagggctttaaatataaagcaaaacaaagcaatgcttgcaaaactcatgtctgaattagaaagcttccctggctcgttccgtggaagacatcccctcccaggctccgactcacaatcaaggagaccgcgaaggcgtacattcccgggtgttgcttccaggagaaaccctgaacggagagctcgtcctcttaccaggtcaaggtcccggatcctcgggtcccttgacgctctacccatggaggaggaggaggaagaggataagtacatgttggtgagaaagaggaagaccgtggatggctacatgaatgaagatgacctgcccagaagccgtcgctccagatcatccgtgacccttccgcatataattcgcccagtggaagaaattacagaggaggagttggagaacgtctgcagcaattctcgagagaagatatataaccgttcactgggctctacttgtcatcaatgccgtcagaagactattgataccaaaacaaactgcagaaacccagactgctggggcgttcgaggccagttctgtggcccctgccttcgaaaccgttatggtgaagaggtcagggatgctctgctggatccgaactggcattgcccgccttgtcgaggaatctgcaactgcagtttctgccggcagcgagatggacggtgtgcgactggggtccttgtgtatttagccaaatatcatggctttgggaatgtgcatgcctacttgaaaagcctgaaacaggaatttgaaatgcaagcataatatctggaaaatttgctgcctgccttctacttctcaaatctttcttgtaaaagtttccaattttttcactgaaacctgagttaaaaatcttgatgatcagcctgtttcataagaaactccaatcaagttaatcttagcagacatgtgtttctggagcatcacagaaggtatattgctagttacactttgccctcctgcagtttcttctctgctcccaacccccatctcatagcatccccctctatttccaatgctcctctccaaccgcttagtttctgaatttcttttaaattacagttttatgaaagcatattttatttacttggtgttgaaatagccctcataaaacctaagcacttggaaacacaataatagtattaactaactagatctattgaatttcagagaagagccttctaacttgtttacacaaaaacgagtatgatttagcattcatactagttgaaatttttaatagaatcaaggcacaaaagtcttaaaaccatgtggaaaaattaggtaattattgcagattgatgtctctcaatcccatgtattgcgcttatgttacaagttgttgtcacagttgagacttaatttctcctaatttcttctgcccgaagggtaagtggtgcgtccagcttacacaatcataattcaaaggttggtgggcaatgtaatacttaattaaaataatgatggaagagctatctggagattatgagtaagctgatttgaattttcagtataaaactttagtataattgtagtttgcaaagtttatttcagttcacatgtaaggtattgcaaataaattcttggacaattttgtatggaaacttgatattaaaaactagtctgtggttctttgcagtttcttgtaaatttataaaccaggcacaaggttcaagtttagattttaagcacttttataacaatgataagtgcctttttggagatgtaacttttagcagtttgttaacctgacatctctgccagtctagtttctgggcaggtttcctgtgtcagtattccccctcctctttgcattaatcaaggtatttggtagaggtggaatctaagtgtttgtatgtccaatttacttgcatatgtaaaccattgctgtgccattcaatgtttgatgcataattggaccttgaatcgataagtgtaaatacagcttttgatctgtaatgcttttatacaaaagtttattttaataataaaatgtttgttctaacttgtctgcttttttaaaaataatcttactgtacttaattctaattttttcctcatatttaaataaaaggccatttccaccttttct

SEQ ID NO: 2465 - protein, 450 aa, Homo sapien
MDARRVPQKDLRVKKNLKKFRYVKLISMETSSSSDDSCDSFASDNFANTKPKFRSDISEELASVFYEDSDNESFCGFSESEVQDVLDHCGFLQKPRPDVTNELAGIFHADSDDESFCGFSESEIQDGMRLQSVREGCRTRSQCRHSGPLRVAMKFPARSTRGATNKKAESRQPSENSVTDSNSDSEDESGMNFLEKRALNIKQNKAMLAKLMSELESFPGSFRGRHPLPGSDSQSRRPRRRTFPGVASRRNPERRARPLTRSRSRILGSLDALPMEEEEEEDKYMLVRKRKTVDGYMNEDDLPRSRRSRSSVTLPHIIRPVEEITEEELENVCSNSREKIYNRSLGSTCHQCRQKTIDTKTNCRNPDCWGVRGQFCGPCLRNRYGEEVRDALLDPNWHCPPCRGICNCSFCRQRDGRCATGVLVYLAKYHGFGNVHAYLKSLKQEFEMQA

SEQ ID NO: 2466 - DNA, 334 bp, Homo sapien
  Unsure 97, 119, 192, 223, 225, 295: Unknown base
gatcgggatgcaagatttttgagactcactggtctgaaactgcctttcctcttaaatttagttaagtatttccctgggcatggaattcaaaggtggntatgacttttcttcaggattgngaatgtatttatatcctcccatcttacgttgctattgagaattctgaagttcttctgattcctgattctttgnatgtgtattcctcattccacaccttccccanantgcatgcagaatttcttcctttctattttcttttctctttttctgaaacttcttattatctgggatcttntgcctctcggattagggctctaattttccgacattttct

SEQ ID NO: 2467 - DNA, 926 bp, Homo sapien
  Unsure 113-178: Unknown base
gactgtgtcaactaagtcaaactagactaaatttactatttgtcccttgtgctttttctcccttcttagttatcttgccctctgtattagtccattttcacactgctataaannnnnnnnnnnnnnnnnnnnnnnnnnnnnnnnnnnnnnnnnnnnnnnnnnnnnnnnnnnnnnnnnnaggacaatctatgatatgttgtaaaatcattcggacttttggattactgttattttgtttcagcagcagtgggacagagagaagctatgccatatccttcccttagactatgctcaaagatattatgttatactggcttttctgatgatatttactttttgtttttatagttgttgcattgatgttactcatttaggaaaggtgaaagagaaatccctatgagaagcacaatgttaaatcaagattcattttagttataaatatgacctggatatttggagatatcttgaaattctctgttttgggggtttgggttgtgggggattggcttgttttgtttgggagtatttcttctcattgcctgtcttcttatcttactacagactataggcttggaagaagaatgacaaaacctaagcacaaggcagttatcttgaatgatatttcttaccttttctgttttgcaggacatcagaactgatgtttcttttttgttttcgttctatttttttctgcatcctgtctttcatgaaaatatttttctctcccttgatatcactgcttttttctttttgatatatgaatacacagctactcctgtgttctttacttctttaaacagttaacccttttatgttactgtaggcagaaaaagggtagctgttaatcatttaggcactgaagagggtaaaactttgtttgcctgccctagtttgttggctgtctctgagtttgtgtgtgtatcccc

SEQ ID NO: 2468 - protein, 93 aa, Homo sapien
  unsure 37-59: unknown amino acid
  Unsure 113-178: Unknown amino acid
LCQLSQTRLNLLFVPCAFSPFLVILPSVLVHFHTAIXXXXXXXXXXXXXXXXXXXXXXXGQSMICCKIIRTFGLLLFCFSSSGTERSYAISFP

SEQ ID NO: 2469 - DNA, 1327 bp, Homo sapien
  Unsure 11: Unknown base
atttactattnattaaatggaagtgggtcaacataaaagtcttcattctcattgtcttcacattgagtaggcagaggaggagaaagatggggaggaagagaaggcgttggtcttgcagtcttgtcttaggggtgtggggagtgggggaaagaatattcatgtataagtgggaccccttgcaattcaagcccttgttgttcaagggtcaactgtaataggatatagctatttttcttcctctatcaaccaaatggtaagcatctattttgtagtccactctactgagctaaattatagatccagctatgctatttataattattttcttgatgaataaattttcaatttctcctctgaccatttcagaacatcttccaataactcataaaacaactgaagtaaaattgagtgctggaaaatatattcaccaaactttggtaatttaagttgactaaagtttaaaattaagtctaaaatagtttacacctatactgcataatccaacaattttaatttcagttgaagacatgttactaatataactattattaaaagagtagaggatgtgtaattaaccatatcttctaaaacatggttactaaaagaatatgtaacatcaatattgaccttggtttcttacacaagtgttgctaactcaatagtgaaggagacactattaaattttctgaacccatgagagatactagagatggggagtggaaagtgtttggttcagggatatctgaagaacagaagggcagagatttcttaagtgacgcctcatctacaagctggaaattcctaaaaacaagtagaaagcttataaacaacaggtgatacactcacctcactggttttagtaaattaccaatacagaaagtatccctagtcttaaaaacaagtggaaaatttgaactgattagtcatattcctttgattacactgtttgttacaatatttttctcagtaaacagaaataactaatttttttgttcttcattctttgatagaaattaaaatcttattctgtgaggattacagaatactataactcaaattataaagtagaataaactctttaaataattattcttcatcataaagtgtaaagaataagatataagaaaacaatttatttttaaaatttaatatactaaatgctcaaatatgttctactatagaataagttcttatcttaatttacagggcactaaaaacaattttaaaatgcttaatgttgccttttatattttaattggttaagaatatatatttgtttaatgcaaatcagaatcactatattaaaatgaatgttcttgaaaaaaaa

SEQ ID NO: 2470 - DNA, 528 bp, Homo sapien
gtcgacataaaatgctatattaatttttcccacttaatattttagcatgacactaatgtatgaagttggttctcctccctcttagcaaggtactgcaacccactattgactatgttaaagtctaaaaataaagaagataataaaggtaataaaatggtgattaccttcttcaagttgcttagaagtctgaagaggcaccaactcttacaaactaaattttcactttggctgactcagtctcatttcttaattttttctttacatcaccccacctcccagccttatgcctcatcacttactacctactgatcagtttaatgggcctcagaaaggctatggaaatcctaaaatgcagagtcatttacaaacttccctcacatgagccctccaatccctatgggtgcactggaatatccattttgttggtgatttatgggttagaaagagcccttaattgcttcactagcatggacttctctgtgaccaagaaaaaaaaaaaagtcgagcgccgcgaattagtagtagtag

SEQ ID NO: 2471 - DNA, 6525 bp, Homo sapien
  Unsure 4449: Unknown base
aaaatgttgatattttctcttagcaggctgtcaaccaggttaggttcaggtcataagtttctacccacattctttgaactgtagttgtcattttagtttatttttcaaaaacttttgcagtacctttttggtctgtcttgtgtgtgccttgcagtgaacagtctggatttggacagtggtctgtctgttagttcagtttctcaagcctttgtcacactaataggattggatttatgtatgtccagcttgggaattattacaggaattaaaaacaactttttagagtgctttcctgagctctctttctatttgttcccccttctactttttgcttccctgtggctgctgtttctatcctccagccagagagctagtgtttattttctccattgtgttacacacttgtgcagctgcaaccaccatatccagggcccaatggtaggaggtagagaagaaaagcaaaagggattggcctcatcctcttacaacgatagttccattgaatagagagaaaggttttcctgcctcagagtgttggctgcactaggcttttgttactgtagtctggccctgttaccatgggattgcttgcatgtggggatacaggagaattcagaaaagaaaaaaagatttgctatttctacattctccctgagcattaagacctcccttgcccattcctcaattcaaagctaaggcttcttctggagctgcctctgtgggcggttcgggagataccaaaggagaaaaagtaccactgttgatatggtggtatttcaaattctggtctaccctatttcacatgccttgtttacttttcagagctgacagattgctgctccatgcattctgtccagtttcctaagagagacagcttggagtatgcttaatccatcttacctgggactgaaacagctgcttattttgccgttaaaaattacatgcagtttactgcgtggctccgggtttgtttgtttgtttttcctctttaataggtttattcagaaaacatgtccactgcaattagggaggtaggagtttggagacagaccagaacacttctactgaagaattacttaattaaatgcagaaccaaaaagagtagtgttcaggaaattctttttccactattttttttattttggttaatattaattagcatgatgcatccaaataagaaatatgaagaagtgcctaatatagaactcaatcctatggacaagtttactctttctaatctaattcttggatatactccagtgactaatattacaagcagcatcatgcagaaagtgtctactgatcatctacctgatgtcataattactgaagaatatacaaatgaaaaagaaatgttaacatccagtctctctaagccgagcaactttgtaggtgtggttttcaaagactccatgtcctatgaacttcgtttttttcctgatatgattccagtatcttctatttatatggattcaagagctggctgttcaaaatcatgtgaggctgctcagtactggtcctcaggtttcacagttttacaagcatccatagatgctgccattatacagttgaagaccaatgtttctctttggaaggagctggagtcaactaaagctgttattatgggagaaactgctgttgtagaaatagatacctttccccgaggagtaattttaatatacctagttatagcattttcaccttttggatactttttggcaattcatatcgtagcagaaaaagaaaaaaaaataaaagaatttttaaagataatgggacttcatgatactgccttttggctttcctgggttcttctatatacaagtttaatttttcttatgtcccttcttatggcagtcattgcgacagcttctttgttatttcctcaaagtagcagcattgtgatatttctgctttttttcctttatggattatcatctgtattttttgctttaatgctgacacctctttttaaaaaatcaaaacatgtgggaatagttgaattttttgttactgtggcttttggatttattggccttatgataatcctcatagaaagttttcccaaatcgttagtgtggcttttcagtcctttctgtcactgtacttttgtgattggtattgcacaggtcatgcatttagaagattttaatgaaggtgcttcattttcaaatttgactgcaggcccatatcctctaattattacaattatcatgctcacacttaatagtatattctatgtcctcttggctgtctatcttgatcaagtcattccaggggaatttggcttacggagatcatctttatattttctgaagccttcatattggtcaaagagtaaaagaaattatgaggagttatcagagggcaatgttaatggaaatattagttttagtgaaattattgagccagtttcttcagaatttgtaggaaaagaagccataagaattagtggtattcagaagacatacagaaagaagggtgaaaatgtggaggctttgagaaatttgtcatttgacatatatgagggtcagattactgccttacttggccacagtggaacaggaaagagtacattgatgaatattctttgtggactctgcccaccttctgatgggtttgcatctatatatggacacagagtctcagaaatagatgaaatgtttgaagcaagaaaaatgattggcatttgtccacagttagatatacactttgatgttttgacagtagaagaaaatttatcaattttggcttcaatcaaagggataccagccaacaatataatacaagaagtgcagaaggttttactagatttagacatgcagactatcaaagataaccaagctaaaaaattaagtggtggtcaaaaaagaaagctgtcattaggaattgctgttcttgggaacccaaagatactgctgctagatgaaccaacagctggaatggacccctgttctcgacatattgtatggaatcttttaaaatacagaaaagccaatcgggtgacagtgttcagtactcatttcatggatgaagctgacattcttgcagataggaaagctgtgatatcacaaggaatgctgaaatgtgttggttcttcaatgttcctcaaaagtaaatgggggatcggctaccgcctgagcatgtacatagacaaatattgtgccacagaatctctttcttcactggttaaacaacatatacctggagctactttattacaacagaatgaccaacaacttgtgtatagcttgcctttcaaggacatggacaaattttcaggtttgttttctgccctagacagtcattcaaatttgggtgtcatttcttatggtgtttccatgacgactttggaagacgtatttttaaagctagaagttgaagcagaaattgaccaagcagattatagtgtatttactcagcagccactggaggaagaaatggattcaaaatcttttgatgaaatggaacagagcttacttattctttctgaaaccaaggcttctctagtgagcaccatgagcctttggaaacaacagatgtatacaatagcaaagtttcatttctttaccttgaaacgtgaaagtaaatcagtgagatcagtgttgcttctgcttttaatttttttcacagttcagatttttatgtttttggttcatcactcttttaaaaatgctgtggttcccatcaaacttgttccagacttatattttctaaaacctggagacaaaccacataaatacaaaacaagtctgcttcttcaaaattctgctgactcagatatcagtgatcttattagctttttcacaagccagaacataatggtgacgatgattaatgacagtgactatgtatccgtggctccccatagtgcggctttaaatgtgatgcattcagaaaaggactatgtttttgcagctgttttcaacagtactatggtttattctttacctatattagtgaatatcattagtaactactatctttatcatttaaatgtgactgaaaccatccagatctggagtaccccattctttcaagaaattactgatatagtttttaaaattgagctgtattttcaagcagctttgcttggaatcattgttactgcaatgccaccttactttgccatggaaaatgcagagaatcataagatcaaagcttatactcaacttaaactttcaggtcttttgccatctgcatattggattggacaagctgttgttgatatccccttattttttatcattcttattttgatgctaggaagcttactggcatttcattatggattatatttttatactgtaaagttccttgctgtggttttttgccttattggttatgttccatcagttattctgttcacttatattgcttctttcacctttaagaaaattttaaataccaaagaattttggtcatttatctattctgtggcagcgttgncttgtattgcaatcactgaaataactttctttatgggatacacaattgcaactattcttcattatgccttttgtatcatcattccaatctatccacttctaggttgcctgatttctttcataaagatttcttggaagaatgtacgaaaaaatgtggacacctataatccatgggataggctttcagtagctgttatatcgccttacctgcagtgtgtactgtggattttcctcttacaatactatgagaaaaaatatggaggcagatcaataagaaaagatccctttttcagaaacctttcaacgaagtctaaaaataggaagcttccagaaccaccagacaatgaggatgaagatgaagatgtcaaagctgaaagactaaaggtcaaagagctgatgggttgccagtgttgtgaggagaaaccatccattatggtcagcaatttgcataaagaatatgatgacaagaaagattttcttctttcaagaaaagtaaagaaagtggcaactaaatacatctctttctgtgtgaaaaaaggagagatcttaggactattgggtccaaatggtgctggcaaaagcacaattattaatattctggttggtgatattgaaccaacttcaggccaggtatttttaggagattattcttcagagacaagtgaagatgatgattcactgaagtgtatgggttactgtcctcagataaaccctttgtggccagatactacattgcaggaacattttgaaatttatggagctgtcaaaggaatgagtgcaagtgacatgaaagaagtcataagtcgaataacacatgcacttgatttaaaagaacatcttcagaagactgtaaagaaactacctgcaggaatcaaacgaaagttgtgttttgctctaagtatgctagggaatcctcagattactttgctagatgaaccatctacaggtatggatcccaaagccaaacagcacatgtggcgagcaattcgaactgcatttaaaaacagaaagcgggctgctattctgaccactcactatatggaggaggcagaggctgtctgtgatcgagtagctatcatggtgtctgggcagttaagatgtatcggaacagtacaacatctaaagagtaaatttggaaaaggctactttttggaaattaaattgaaggactggatagaaaacctagaagtagaccgccttcaaagagaaattcagtatattttcccaaatgcaagccgtcaggaaagtttttcttctattttggcttataaaattcctaaggaagatgttcagtccctttcacaatctttttttaagctggaagaagctaaacatgcttttgccattgaagaatatagcttttctcaagcaacattggaacaggtttttgtagaactcactaaagaacaagaggaggaagataatagttgtggaactttaaacagcacactttggtgggaacgaacacaagaagatagagtagtattttgaatttgtattgttcggtctgcttactgggacttctttctttttcacttaattttaactttggtttaaaaagttttttattggaatggtaactggagaaccaagaacgcacttgaaatttttctaagctccttaattgaaatgctgtggttgtgtgttttgcttttctttaaataaaacgtatgtataattaagtgaagctgcatgtttgtattgaagtatattgaactatatagtttgtatgtcatctttttcaccattcagaaacagtgcttctgaatttgtgatttaaaggaattgtaatagaatagttttatttttaagttatctttaagtttatgccatcttcttaaataagtacgtaatgttccaatctaaataaaaaactaatacataactaatgcatagaaaagatacataaagcaatgtgaaagtttcttgcttctcctttttaatttctaaaaaagccactttgaatggaagttgtcatccgtaaaagctgaagtgtaagcactaggaaatctcaatatagagatttgaggaaagttatatccactaggtggcagtcattgatcataataagtgaaat

SEQ ID NO: 2472 - protein, 1642 aa, Homo sapien
  unsure 1147: unknown amino acid
  Unsure 4449: Unknown amino acid
MSTAIREVGVWRQTRTLLLKNYLIKCRTKKSSVQEILFPLFFLFWLILISMMHPNKKYEEVPNIELNPMDKFTLSNLILGYTPVTNITSSIMQKVSTDHLPDVIITEEYTNEKEMLTSSLSKPSNFVGVVFKDSMSYELRFFPDMIPVSSIYMDSRAGCSKSCEAAQYWSSGFTVLQASIDAAIIQLKTNVSLWKELESTKAVIMGETAVVEIDTFPRGVILIYLVIAFSPFGYFLAIHIVAEKEKKIKEFLKIMGLHDTAFWLSWVLLYTSLIFLMSLLMAVIATASLLFPQSSSIVIFLLFFLYGLSSVFFALMLTPLFKKSKHVGIVEFFVTVAFGFIGLMIILIESFPKSLVWLFSPFCHCTFVIGIAQVMHLEDFNEGASFSNLTAGPYPLIITIIMLTLNSIFYVLLAVYLDQVIPGEFGLRRSSLYFLKPSYWSKSKRNYEELSEGNVNGNISFSEIIEPVSSEFVGKEAIRISGIQKTYRKKGENVEALRNLSFDIYEGQITALLGHSGTGKSTLMNILCGLCPPSDGFASIYGHRVSEIDEMFEARKMIGICPQLDIHFDVLTVEENLSILASIKGIPANNIIQEVQKVLLDLDMQTIKDNQAKKLSGGQKRKLSLGIAVLGNPKILLLDEPTAGMDPCSRHIVWNLLKYRKANRVTVFSTHFMDEADILADRKAVISQGMLKCVGSSMFLKSKWGIGYRLSMYIDKYCATESLSSLVKQHIPGATLLQQNDQQLVYSLPFKDMDKFSGLFSALDSHSNLGVISYGVSMTTLEDVFLKLEVEAEIDQADYSVFTQQPLEEEMDSKSFDEMEQSLLILSETKASLVSTMSLWKQQMYTIAKFHFFTLKRESKSVRSVLLLLLIFFTVQIFMFLVHHSFKNAVVPIKLVPDLYFLKPGDKPHKYKTSLLLQNSADSDISDLISFFTSQNIMVTMINDSDYVSVAPHSAALNVMHSEKDYVFAAVFNSTMVYSLPILVNIISNYYLYHLNVTETIQIWSTPFFQEITDIVFKIELYFQAALLGIIVTAMPPYFAMENAENHKIKAYTQLKLSGLLPSAYWIGQAVVDIPLFFIILILMLGSLLAFHYGLYFYTVKFLAVVFCLIGYVPSVILFTYIASFTFKKILNTKEFWSFIYSVAALXCIAITEITFFMGYTIATILHYAFCIIIPIYPLLGCLISFIKISWKNVRKNVDTYNPWDRLSVAVISPYLQCVLWIFLLQYYEKKYGGRSIRKDPFFRNLSTKSKNRKLPEPPDNEDEDEDVKAERLKVKELMGCQCCEEKPSIMVSNLHKEYDDKKDFLLSRKVKKVATKYISFCVKKGEILGLLGPNGAGKSTIINILVGDIEPTSGQVFLGDYSSETSEDDDSLKCMGYCPQINPLWPDTTLQEHFEIYGAVKGMSASDMKEVISRITHALDLKEHLQKTVKKLPAGIKRKLCFALSMLGNPQITLLDEPSTGMDPKAKQHMWRAIRTAFKNRKRAAILTTHYMEEAEAVCDRVAIMVSGQLRCIGTVQHLKSKFGKGYFLEIKLKDWIENLEVDRLQREIQYIFPNASRQESFSSILAYKIPKEDVQSLSQSFFKLEEAKHAFAIEEYSFSQATLEQVFVELTKEQEEEDNSCGTLNSTLWWERTQEDRVVF

SEQ ID NO: 2473 - DNA, 809 bp, Homo sapien
gtctagaggaattggatttatttccataggaagactgacttggaaactgcaaaggaacaaattgaaaaagaaaagggcagataagaaagcacaaggaacattgttccaaatctgctcaagactcaaggtgaaagagagagtagaggaagggcaaaggacaaagaaaagtagatgaaagattctgagggggaggaaggcaaggtctcagcagtctcatgtgaagactcatcacctcacttcaggatggtcttaattttgtgtatgttagtgtggcatctatatgaggtaatcataagtggtcttgatttgactgtggagacaacactccaaacaaaccagcaggtacatttcttccagtgtatgtgtccactgcagtgtctcccattagtaaatatccacattctcccacagagtggttcacaaaaagggttatgagtttttgtcaaatgaaccagactggacaaaaactgcaaaataaaaaaaaacaatagataggaagagtcagagctcattcaccatcaattctgggctcctggccccttcttcactaggaaataaccagccaggtttagtctcctctggaagaccggatgacaagtttcttctattcctttcctcttccagtgcgccaacctgcaggccgccattgctgatgctgagcagcgtggggagatggccctcaaggatgccaagaacaagctggaagggctggaggatgccctgcagaaggccaagcaggacctggcccggctgctgaaggagtaccaggagctgatgaatgtcaagctggccctggacgtggagatcgc

SEQ ID NO: 2474 - protein, 87 aa, Homo sapien [sequence omitted]

SEQ ID NO: 2475 - DNA, 968 bp, Homo sapien
ctggttaatgccaactcaccggtaatgacaggtagtaatctgagaacaagcatagataattggttcattttcttgctgtcactatggtagctcacattaggaagataacttggttcaggggcaggagcactggaggcggggcacctgcaggtcttcattttaatactcacataatggtgaaaattgtttgaaaatatttggaattaacaccaacactaaagtattcttgctgtcttggaaagggaagtcattgtcttgaggaatcttgtgtaagttcaatttggattcagagagctaatttctggaaagctgtattaaatgctaaggcttcagcattccactgggtgtgccgtcatctaacataaaataataccattttgtgagaagcgtatggtaaagagagaaataatcgagttgtagcacccacagattgagatcatcctgacactcagcagtgatgctgcaacgggataattgagggctaggcatgggggaagctctcgcaacttttgaaagctattatgaattttttagttttctcttgtagattcttgatttatctgcctcttgcttgtttttctatctcgaaagtatgtctgagaaatgctgttttagagagcaggtccttaattttctattgaattttgacatggagcccttcctcaattaatataaaatatacctactttcactgcccagttcttgcaatacaaaaaaaatgagaaaaatttatttgggctttccattgatgtcatatttaataggttttgagaggaggttatttaccattagagatgttgtctttttaaattatagaggatataagtctacagtatttttttctactgtacttacaatttggcatttgcttgtatgtttagaaatatcaaatttaatattaaagtaccagagatcttttatttcacaatacttattttaccagtctgcacgtatatgttctacagtta

SEQ ID NO: 2476 - DNA, 416 bp, Homo sapien
tttttttttttttaaacttctctatattaggaactttgttttccttatccaaatgcagtctctaagggatcagtgggatttgagtgctaagttaaatgtctagtaaaaaattaaacaaaagaattcaagcaatcaaaatgatgcctgcatttgctgcctacagaaatgtaggctgcattgcatgtgtaaatggcaagaaaatttgggcgttagctaaccctttatatactgcttttctcaaactcatccaaacatgacagcttgtaaaaccgtttatatatttaaggtgtattagaccaagcctaggcacatgtaccagcctgtccatttgaagaggagtttaaggcagaacataccctttctaatttcattagtaattaacttgtactataattctcctgagatacttatttctc

SEQ ID NO: 2477 - DNA, 1291 bp, Homo sapien
aaaaaaacaaaaaacaaaacaaaaaaaaaaccttccaaaagaagtttgagataattttatgtttagaaaaattagaaattggattgagtaaaatttacatattttacacaagaggactaacatctttataatatttaacctttcagtaaatttatgttttatgtttctcagcctatcttttctagtataggtgatttttttagtgtggttactattgtaaatgagatcctactactttaaaaaatgaaaattaaatctatcgcttttatgactttaaaacattagacttatgtaagtgtaaacattatttaaaaacataatgtagaaaattaaagtcccccataattaaaatccctttcccccagaaaaagtcaacagcatattcatcagttttttcctaaagtatgttttagcactttgaccatatgagacaacccttctgctgttagcatttttctctttgcaatagatcttcctatgtcagtacacatcaatctacctcattcttacctctgcataagagagtagtgtgtagttgtataatagtttaacttggcgattggttattgattttgtaactagccagttactgaattattctaaaggttttgctgttgttaatttctttcgcctttttcagttgggtaatagttctgggtaggttgataattttattcccatatttgtaatcttatttcactttctcaactcatcacattgactggtacttttagaacaatgttaaaaaacatttacataattgtgctgatattgtacattatttgatatatatatattttttttacttagaagagtgtttctccaaaactataaatttgactcttagtgtaaaataatcttaatatttgaattatacattcaggttatgccctctatttctagtttgatgaaaatattattagtaatggatgttggggttttattaaatggcttttttccacatctgtcaagatgatcaactggcttttctctattatgactttagatgaatcgttttaatagatttgctaatgttaagacatctctgcatttctacaagaatctgatgtagtcatagtatactattcttttaatatacatctcctttcaatgttaacagtggttatttatgattggttggtccatagtagatttttattttgtgtttcttatctgtactttctgatttttctacaaagattgtgtattacttgtataataaaaataagagctttaaattgtgaaattcttctggatttggttttctcattttattatggaatttttcata

SEQ ID NO: 2478 - DNA, 1727 bp, Homo sapien
  Unsure 363: Unknown base
tggggatcccttttgactgctagacattcctggacaggcaggcgttcccacttccttcttaagtatttcctatccctttgctgttgacttccagtattctctcttggatgatctatttgaagtgtgattatctactcaccactgtggttcttcttggtggaggcggcaactactaaatgcttctagtcagctgtcctgaagtgcctgttggaatttggtgcttaaaataattcttagttgatttccaattttgtttggtttttctgtgttctcctttagttctttgagtgtattttgaagtctttagtacatctgatgctttaggttaagggacagtttctgcacattttttcctatgaatanaccatgttttgttctttgtatgccttgtaattttttgttgaaaactggacatctgaaaaacagccaagtttcccagtctttgcagactggctccatgccaggaagggacctccactcactagtaagatgtgttctgacctttagcatcatcccacgatgaagccccaaagaccctccaggactttgcttggtaagggtcttgcctgaggccctgtgtgtatttgtttttattctgttacaccacgcttttaaattttttacttttccaaagagtcttcctgtaccttgttctagtccataggtctgcagtcctgcagctttcagttacccaccactttctatggcttttccaaggctgcgctctacgtataccacttttcctcatccaagctccaagttaggcaaaacagagaccagttcttcagcagcccccaaaatgttgcaaataagatctgtcctgctccctcctacttgagggaggtcactggtacctgggctgctgcttcctcccaacactaccacactgtggagagggtggggcaagcctgagtaaaactaccacaaaatttcttaccattttgaatgtgacttttccttgattgggcattagcttggttcttgtagacctttgcctttcagagttcccataaagttttctttagtcagtctctacttgtaatctttccatggggaatgaagacatgtagctgcctattcttcttgctgctgtatagtccaagcacagtgcaaaaataaaatgtacagcataacaagttattttacaacagacacatgtaatcataatgcaactcaaaaaacagaacatttgtaaaacttagtaagttccctgcttaccaaatcactgatatccctcgccctcccttcccaaagctgaccattattttaactttgtgggcaatgatgtctttgctttgctttatactttaacagttatgtatacatccctaaacaaaatataataatcttgcctgtttgggaactataaacagaaacgtatgttacatatccttttgtctgattctttaatgtttttaccaatgttttttccatataaaggtatcttttctccttgtatttatttctttttatgaatatactgctgtcaacttgtctatttatgtttaagatttagaatggctggatataggaatatgtatattgtcagttgcactaactaatgccaaagttttccatagtggtttttaccagcaatatatgggagctcatttatgcataccttctccaattagccaatctggtggacagtatgttcattttcatgtatttatttgccatttgggtttttcttctgttaagggctaataaaaatattttgttttcct

SEQ ID NO: 2479 - DNA, 559 bp, Homo sapien
  Unsure 33: Unknown base
tttttttttgagacaaggtcttgctttgttgcntaggctagagcgcagtggcacaatctcagctcactgaaacctctgcctcctgggttcaaggattctcctgtctcagcctcccaagtagctgggactataggtgtgtaccaccacgcccggctaatttttgtatttttggtagagatgaggtttcatcatgttggccaggctggtcttgaacttctgacctcaggtgatccgcctacctcggcctcctgaagcgttgggattacaggcgtgatccacacccagccactgtccactttttaataccattctatccttatatgctcttttaatttctatcttgaatactcaaaatacaaataaaagtaaaaaaagatcacctcataaatacttgctttgtctctccaagtaagaatacttgaggacatacaactgaaacctgtttcagtttaagaatcttgtatttgtgttgcttttgaactttagtttgcattatactttttaaaaacagccttaatgaggtataatttacatcctacaagactcatctttgtaagtg

SEQ ID NO: 2480 - DNA, 622 bp, Homo sapien
  Unsure 489: Unknown base
ggcacgaggggaccctcgtgatgattgtacacgatgtggctgacatttggctggagtctgctaagatgttttcttatgctggatggacgcagacctgtaacaccctgtttttcatcttctccaccatatttttcatcagccgcctcattgtttttcctttctggattttatattgcacgctgatcttgcctatgtatcacctcgagcctttcttttcatacatcttcctcaacctacagctcatgatcttgcaggtccttcacctttactggggttattacatcttgaagatgctcaacagatgtatattcatgaagagcatccaggatgtgaggagtgatgacgaggattatgaagaggaagaggaagaggaagaagaagaggctaccaaaggcaaagagatggattgtttaaagaacggcctcggggctgagaggcacctcattcccaatggccagcatggccattagctggaagcctacaggactnccatggcacagcatgctgcaagtactgttggcagcctggctttccaggccccacaccgaccccacattctgccctttccctctttctcaccaccgccttccctcccacctaagatggggtttaccaaaaatgt

SEQ ID NO: 2481 - DNA, 346 bp, Homo sapien
tttttttaaatgtgaatatctttaggtggggcatgctctctttgattagctgtagtttcttccactccctactgtattacaagaggctgtgtatctctaccttgcaaacaatttgtgtatctcgtccaaccttaattcttttattcacatctatatcctttctcactggtctacatgatttttataagtgtggtgtggtagttttccactatggttatagtattttaaatatctcttttgaaataaggtttttttaaatgtatttcaaaactatgttaaatatgtaaagcctcattacttttttaaaaatgtattttatttttttagagacggggcaggggtgggt

SEQ ID NO: 2482 - protein, 84 aa, Homo sapien
FLNVNIFRWGMLSLISCSFFHSLLYYKRLCISTLQTICVSRPTLILLFTSISFLTGLHDFYKCGVVVFHYGYSILNISFEIRFF

SEQ ID NO: 2483 - DNA, 1922 bp, Homo sapien
  Unsure 1790-1868: Unknown base
attggttaaactgcttagaacctgacagatggtaagcttgtaaacatattaaatatagagagaaactcgtgtcaaactgtaaagtgcaaaactttagttgctcatttttctgaaaaaagcttatatgaaatgaccaatataaaaatgtaagtaatatttcttaagtttgagtttagcatcttatggaatatgagtgaggcttttttttcttttgttttgtcatttgcattaaagttttggagttgtatcttattggtttcatttgaaaaatctcattacactttcatttctgtaattgtttaccccttttttgttacatgtttttccatagccattctttgccccatacctttacacgccaaggtattaccctggcggctcccaacatctcatctcacgtccatcagtaaaaacgagtttgcccagagatcagaacaatggcctagtaagtatataaaagggtaacgcaaatattaatttaataataaacatagatagcatttgaggtttggttatttcctttacatagtaaaagagtgcaactgattttatacatagttttaagaaacaacctattactaacataaaatgtatttattttcatttctggtaaatatctatggaaggaaaatgactagcagtctcagcgaagaaatgttgacttgtttatagccagaaatttctggcttgtaatatagtgtttgctaccaaaacttttaaaactaagcctttacatttggtaatttctaatatcttcttaaagaacatgtgtatacagtacctttatagtatgtaaatattagcaccatgatataaaaaatagaggatgtattgaaggaagaacatttcaatcaaatggcaggaattaaacaagataagggaaattcttccaatgaactattgaatctaataaagacatttgtgcccaaaatattagaggttcctgatgataaaagtaatagtttaaaaaaagaaactctctattaatatgtttttataaatcaggaggcaaaaacataaactgttgagtttcagtgttgtatattattttaccatcatgttcatttgtcttcacagtttggctccccccttccccttttcacccacactctcctgttttttgttgttaggaagttatcaaggaggatgctgctgaggggctttcttcacccacagactcctcgagggtaatggagtagtcctgtggtgtggatcgctggcatctcattgcttctgcctcagtaatgactgtcttaattgtgatgatagcagctcactaactctgcgtttgtggtgtgatgagcagctagtgtagagtagctgaatgctaataattatggttcctgaattaattaaaaagcggatgtttaacttcacccattatttcctcctgcttttcccctttttcaatacatgggatggggtttttttttattcttcaataaggaagggctttttctatcagctgtcaggggtgttccgttggtagtatttgctcctcagtgtgagctctagctttgcctttgactgtttttgttaagcctgtggttgctattacacatgtggaatattttagaaaagtatccagtatcacccttgagactacaaaaagacacataagctagatggtgtagactaaaaatgcatctttaataactcaatctaggtgtctacatttagttaagtcttagtctgagttttagtgcagtgttataatacttttctttgtctatatatttgttaaaataaattttccagataaacagaagatcgttcagcatgtaaaagannnnnnnnnnnnnnnnnnnnnnnnnnnnnnnnnnnnnnnnnnnnnnnnnnnnnnnnnnnnnnnnnnnnnnnnnnnnnnncaaaaaataaacagaaaaaccttgtagagggaatcacctcataaattactatgt

SEQ ID NO: 2484 - protein, 91 aa, Homo sapien [sequence omitted]
